(19) United States
(12) Patent Application Publication
(10) Pub. No.: US 2009/0186815 A1
(43) Pub. Date: Jul. 23, 2009

(54) IDENTIFICATION OF JAK/STAT PATHWAY MODULATING GENES BY GENOME WIDE RNAI SCREENING

(76) Inventors: Michael Boutros, Heidelberg (DE); Martin Zeidler, Göttingen (DE); Patrick Mueller, Göttingen (DE)

Correspondence Address: MILLEN, WHITE, ZELANO & BRANIGAN, P.C., 2200 CLARENDON BLVD., SUITE 1400, ARLINGTON, VA, 22201, US

(21) Appl. No.: 11/917,653

(22) PCT Filed: Jun. 14, 2006
(86) PCT No.: PCT/EP2006/005744

§ 371 Date: Dec. 16, 2008

(30) Foreign Application Priority Data
Jun. 15, 2005 (EP) 05 012 934.5

(51) Int. Cl. A61K 38/14; G01N 33/566; G01N 33/50; C12Q 1/68; G01N 33/536; C12Q 1/02; C07H 21/04; C07K 14/47; C12N 5/06; C12N 15/87; A61K 31/711

(52) U.S. Cl. 514/12; 436/86; 436/94; 435/6; 436/536; 435/29; 536/23.5; 536/24.5; 530/350; 435/375; 435/455; 514/44

(57) ABSTRACT

The present invention relates to a method for identifying a compound capable of modulating the activity of the JAK/STAT pathway and to the use of different JAK/STAT pathway components as a target for the modulation of the activity of the JAK/STAT pathway. Moreover, the present invention is concerned with a method for modulating the activity of the JAK/STAT pathway. Furthermore, the present invention pertains to a pharmaceutical composition and to the use of different JAK/STAT pathway components and/or effector molecules thereof for the manufacture of such composition for the diagnosis, prevention or treatment of a JAK/STAT pathway associated disorder.

[0001] The present invention relates to a method for identifying a compound capable of modulating the activity of the JAK/STAT pathway and to the use of different JAK/STAT pathway components as a target for the modulation of the activity of the JAK/STAT pathway. Moreover, the present invention is concerned with a method for modulating the activity of the JAK/STAT pathway. Furthermore, the present invention pertains to a pharmaceutical composition and to the use of different JAK/STAT pathway components and/or effector molecules thereof for the manufacture of such composition for the diagnosis, prevention or treatment of a JAK/STAT pathway associated disorder.

[0002] Signalling pathways mediating the transduction of information between cells are essential for development, cellular differentiation and homeostasis (Brivanlou, A. H. & Darnell, J. E., Jr., Science 295, 813-8. (2002)). Their dysregulation is also frequently associated with human malignancies. The JAK/STAT pathway represents one such signalling cascade whose evolutionarily conserved roles include cell proliferation and haematopoiesis (Hombria, J. C. & Brown, S., Curr Biol 12, R569-75 (2002)).

[0003] Developmental genetic screens in Drosophila have identified multiple JAK/STAT pathway components on the basis of their segmentation phenotype (Binari, R. & Perrimon, N., Genes Dev 8, 300-12. (1994); Harrison, D. A., McCoon, P. E., Binari, R., Gilman, M. & Perrimon, N., Genes Dev 12, 3252-63. (1998); Hou, X. S., Melnick, M. B. & Perrimon, N., Cell 84, 411-9 (1996)) and subsequent analysis of the pathway has characterised evolutionarily conserved roles during immune responses, haematopoiesis and cellular proliferation (Lagueux, M., Perrodou, E., Levashina, E. A., Capovilla, M. & Hoffmann, J. A., Proc Natl Acad Sci USA 97, 11427-32. (2000); Boutros, M., Agaisse, H. & Perrimon, N., Dev Cell 3, 711-22. (2002); Meister, M. & Lagueux, M., Cell Microbiol 5, 573-580 (2003); Mukherjee, T., Castelli-Gair Hombria, J. & Zeidler, M. P., Oncogene in press (2005)). The JAK/STAT signalling cascade in Drosophila is comprised of the extracellular ligand Unpaired (Upd) (Harrison, D. A., McCoon, P. E., Binari, R., Gilman, M. & Perrimon, N., Genes Dev 12, 3252-63. (1998)), a trans-membrane receptor with homology to the IL6 receptor family termed Domeless (Dome) (Brown, S., Hu, N. & Castelli-Gair Hombria, J., Curr Biol 11, 1700-5. (2001)), a single Janus tyrosine kinase (JAK) called Hopscotch (Hop) (Binari, R. & Perrimon, N., Genes Dev 8, 300-12. (1994)) and the STAT92E transcription factor (Hou, X. S., Melnick, M. B. & Perrimon, N., Cell 84, 411-9 (1996); Yan, R., Small, S., Desplan, C., Dearolf, C. R. & Darnell, J. E., Jr., Cell 84, 421-30 (1996)) (FIG. 1a). Known regulators of JAK/STAT signalling including a family of SOCS-like genes (Callus, B. A. & Mathey-Prevot, B.; Oncogene 21, 4812-4821 (2002); Karsten, P., Hader, S. & Zeidler, M. P., Mech Dev 117, 343-6 (2002)), dPIAS/Su(var)2-10 (Betz, A., Lampen, N., Martinek, S., Young, M. W. & Darnell, J. E., Jr., Proc Natl Acad Sci USA 98, 9563-8 (2001)) and STAM (Mesilaty-Gross, S., Reich, A., Motro, B. & Wides, R., Gene 231, 173-86 (1999)) are functionally conserved and were identified based on their homology to components originally characterised in mammalian cell culture studies (Hombria, J. C. & Brown, S., Curr Biol 12, R569-75 (2002)). Although successful in identifying the pathway members Upd, Dome, Hop and STAT92E, it is probable that forward genetic approaches have missed components possibly due to non-saturating mutagenesis, genetic redundancy or phenotypic pleiotropy (Nagy, A., Perrimon, N., Sandmeyer, S. & Plasterk, R., Nat Genet 33 Suppl, 276-84 (2003)).

[0004] In order to identify novel pathway components and circumvent limitations of classical genetic screens, the inventors of the present invention have undertaken a genome-wide RNA interference (RNAi) screen, a powerful technique for the identification of new components of diverse cellular pathways (Kamath, R. S. et al., Nature 421, 231-7 (2003); Kittler, R. et al., Nature 432, 1036-40 (2004); Berns, K. et al., Nature 428, 431-7 (2004); Paddison, P. J. et al., Nature 428, 427-31 (2004); Boutros, M. et al., Science 303, 832-5 (2004)). Using this screen, a systematic genome-wide survey for genes required for JAK/STAT pathway activity could be performed. Analysis of 20,026 RNAi-induced phenotypes in cultured Drosophila melanogaster haemocyte-like cells identified interacting genes encoding 4 known and 84 previously uncharacterised proteins. Subsequently, cell based epistasis experiments have been used to classify these based on their interaction with known components of the signalling cascade. In addition to multiple human disease gene homologues, the inventors of the present invention have identified the tyrosine phosphatase Ptp61F and the Drosophila homologue of BRWD3, a bromo-domain containing protein disrupted in leukaemia. Moreover, in vivo analysis demonstrates that disrupted dBRWD3 and overexpressed Ptp61F function as suppressors of leukaemia-like blood cell tumours. This screen represents a comprehensive identification of novel loci required for JAK/STAT signalling and provides molecular insights into an important pathway relevant for human diseases.

[0005] A first aspect of the present invention, therefore, relates to a method for identifying a compound capable of modulating the activity of the JAK/STAT pathway, comprising

(a) contacting a compound with at least one target molecule selected from
[0006] (i) nucleic acid molecules, comprising
   [0007] (i.1) a nucleotide sequence as shown in SEQ ID NOs. 88 to 265;
   [0008] (i.2) a nucleotide sequence which is complementary to a nucleotide sequence of (i.1);
   [0009] (i.3) a nucleotide sequence which has an identity of at least 65% to a nucleotide sequence of (i.1) or (i.2); and/or
   [0010] (i.4) a nucleotide sequence which hybridizes under stringent conditions to a nucleotide sequence of (i.1), (i.2) or (i.3); and
[0011] (ii) polypeptide molecules
   [0012] (ii.1) encoded by the nucleic acid molecules of (i) and/or
   [0013] (ii.2) having the sequences as shown in SEQ ID NOs. 1-87, and
      (b) determining the degree of modulation of the at least one target molecule by the compound.

[0014] In accordance with the present invention, it is to be understood, that the term “modulating the activity of the JAK/STAT pathway”, when used herein, means activating or inhibiting the activity of the JAK/STAT signalling pathway. An activation or inhibition of the activity of the JAK/STAT signalling pathway may e.g. be mediated by an activation or inhibition of at least one component of the JAK/STAT pathway, either directly or indirectly.

[0015] According to the present invention, step (a) of the method for identifying a compound capable of modulating the activity of the JAK/STAT pathway comprises contacting a compound with at least one target molecule selected from the nucleic acid molecules of (i) and the polypeptide molecules of (ii).

[0016] The nucleic acid molecules of (i) used according to the method for identifying a compound capable of modulating the activity of the JAK/STAT pathway comprise in one embodiment of the present invention a nucleotide sequence of (i.1) as show in SEQ ID NOs. 88 to 265. Preferably, the nucleic acid molecules of (i) comprise a nucleic acid sequence of (i.1) as shown in SEQ ID NOs. 88 to 174. More preferably, the nucleic acid molecules of (i) comprise a nucleic acid sequence of (i.1) as shown in SEQ ID NOs. 91, 116, 124, 133, 136, 152, 154, 155 to 174.

[0017] It is to be understood that the Drosophila gene sequences of SEQ ID Nos. 175-265 encompasse respective splice variants.

[0018] Moreover, nucleic acid molecules of (i) used according to the method for identifying a compound capable of modulating the activity of the JAK/STAT pathway comprise in another embodiment of the present invention a nucleotide sequence of (i.2) which is complementary to a nucleotide sequence of (i.1). Preferably, the nucleic acid molecules of (i) comprise a nucleic acid sequence of (i.2) which is complementary to a nucleotide sequence of (i.1) as shown in SEQ ID NOs. 88 to 174. More preferably, the nucleic acid molecules of (i) comprise a nucleic acid sequence of (i.2) which is complementary to a nucleotide sequence of (i.1) as shown in SEQ ID NOs. 91, 116, 124, 133, 136, 152, 154, 155 to 174.

[0019] In a further embodiment of the present invention, the nucleic acid molecules of (i) used according to the method for identifying a compound capable of modulating the activity of the JAK/STAT pathway comprise a nucleotide sequence of (i.3) which has an identity of at least 65, preferably at least 70, more preferably at least 75 and most preferably at least 80% to a nucleotide sequence of (i.1) or (i.2). Within the context of the present application, the term “has an identity of at least 65, preferably at least 70, more preferably at least 75 and most preferably at least 80%”, as used herein, means that the sequence identity is at least 65, 66, 67, 6, 69, preferably at least 70, 71, 72, 73, 74, more preferably at least 75, 76, 77, 78, 79 and most preferably at least 80, 81, 82, 83, 84, 85, 86, 87, 88, 89, 90, 91, 92, 93, 94, 95, 96, 97, 98, 99 or 100%. Preferably, the nucleic acid molecules of (i) comprise a nucleotide sequence of (i.3) which has an identity of at least 65, preferably at least 70, more preferably at least 75 and most preferably at least 80% to a nucleotide sequence of (i.1) as shown in SEQ ID NOs. 88 to 174 or a nucleotide sequence of (i.2) which is complementary to a nucleotide sequence of (i.1) as shown in SEQ ID NOs. 88 to 174. More preferable, the nucleic acid molecules of (i) comprise a nucleotide sequence of (i.3) which has an identity of at least 65, preferably at least 70, more preferably at least 75 and most preferably at least 80% to a nucleotide sequence of (i.1) as shown in SEQ ID NOs. 91, 116, 124, 133, 136, 152, 154, 155 to 174 or a nucleotide sequence of (i.2) which is complementary to a nucleotide sequence of (i.1) as shown in SEQ ID NOs. 91, 116, 124, 133, 136, 152, 154, 155 to 174.

[0020] Finally, the nucleic acid molecules of (i) used according to the method for identifying a compound capable of modulating the activity of the JAK/STAT pathway comprise in a further embodiment of the present invention a nucleotide sequence of (i.4) which hybridizes under stringent conditions to a nucleotide sequence of (i.1), (i.2) or (i.3). The term “hybridizes under stringent conditions” according to the present application is used as described in Sambrook et al. Molecular Cloning, A Laboratory Manual, Cold Spring Harbor, Laboratory Press (1989), 1.101-1.104. Consequently, hybridization under stringent conditions occurs when a positive hybridization signal is still detected after washing for 1 h with 1×SSC and 0.1% SDS at 55° C., preferably at 62° C. and most preferably at 68° C., in particular for 1 h in 0.2×SSC and 0.1% SDS at 55° C., preferably at 62° C. and most preferably at 68° C. It is preferred that the nucleic acid molecules of (i) comprise a nucleotide sequence of (i.4) which hybridizes under stringent conditions to a nucleotide sequence of (i.1) as shown in SEQ ID NOs. 88 to 174, a nucleotide sequence of (i.2) which is complementary to a nucleotide sequence of (i.1) as shown in SEQ ID NOs. 88 to 174 or a nucleotide sequence of (i.3) which has an identity of at least 65, preferably at least 70, more preferably at least 75 and most preferably at least 80% to a nucleotide sequence of (i.1) as shown in SEQ ID NOs. 88 to 174 or a nucleotide sequence of (i.2) which is complementary to a nucleotide sequence of (i.1) as shown in SEQ ID NOs. 88 to 174. More preferably, the nucleic acid molecules of (i) comprise a nucleotide sequence of (i.4) which hybridizes under stringent conditions to a nucleotide sequence of (i.1) as shown in SEQ ID NOs. 91, 116, 124, 133, 136, 152, 154, 155 to 174, a nucleotide sequence of (i.2) which is complementary to a nucleotide sequence of (i.1) as shown in SEQ ID NOs. 91, 116, 124, 133, 136, 152, 154, 155 to 174 or a nucleotide sequence of (i.3) which has an identity of at least 65, preferably at least 70, more preferably at least 75 and most preferably at least 80% to a nucleotide sequence of (i.1) as shown in SEQ ID NOs. 91, 116, 124, 133, 136, 152, 154, 155 to 174 or a nucleotide sequence of (i.2) which is complementary to a nucleotide sequence of (i.1) as shown in SEQ ID NOs. 91, 116, 124, 133, 136, 152, 154, 155 to 174.

[0021] The nucleic acid molecules of (i) used according to the method for identifying a compound capable of modulating the activity of the JAK/STAT pathway may be present in single-stranded or double-stranded form and may be selected from RNA, DNA or nucleic acid analog molecules, such as sugar- and backbone-modified ribonucleic acids or deoxyribonucleic acids. It should be noted, however, that other nucleic acid analogs, such as peptide nucleic acids (PNA) or locked nucleic acids (LNA), are also suitable.

[0022] Moreover, according to the present invention, the nucleic acid molecules of (i) used according to the present invention may be non-recombinant nucleic acid molecules, recombinant nucleic acid molecules generated by recombinant methods, e.g. by known amplification procedures such as PCR, or chemically synthesized nucleic acid molecules. The nucleic acid molecules of (i) may be present in isolated, i.e. purified, form or in non-isolated form, i.e. in a cellular environment.

[0023] In a preferred embodiment of the present invention, the nucleic acid molecules of (i) used according to the present invention are present in a vector, which may be any prokaryotic or eukaryotic vector, on which the nucleic acid sequence is present preferably under control of a suitable expression signal, e.g. promoter, operator, enhancer etc. Examples for prokaryotic vectors are chromosomal vectors, such as bacteriophages, and extrachromosomal vectors, such as plasmids, wherein circular plasmid vectors are preferred. Examples for eukaryotic vectors are yeast vectors or vectors suitable for higher cells, e.g. insect cells or mammalian cells, plasmids or viruses.

[0024] The polypeptide molecules of (ii) used according to the method for identifying a compound capable of modulating the activity of the JAK/STAT pathway are encoded by the nucleic acid molecules of (i) described above and or have a sequence as shown in SED ID Nos. 1-87. According to a preferred embodiment of the present invention, the polypeptide molecules of (ii) have an amino acid sequence as shown in SEQ ID NO. 4, 29, 37, 46, 49, 65, 67 to 87.

[0025] The compound used in step (a) of the method for identifying a compound capable of modulating the activity of the JAK/STAT pathway may be selected from compounds capable of directly and/or indirectly inhibiting or activating the transcription or translation of a nucleic acid molecule of (i). Preferably, the compounds capable of directly and/or indirectly inhibiting or activating the transcription or translation of a nucleic acid molecule of (i) comprise polypeptides such as proteins, enzymes, antibodies, polypeptide inhibitors, polypeptide activators, agonist, antagonists, mimetics, low molecular weight substances, antisense molecules, RNAi molecules and ribozymes. More preferably, the compounds capable of directly and/or indirectly inhibiting or activating the transcription or translation of a nucleic acid molecule of (i) are antisense molecules directed against a nucleic acid molecule of (i) or RNAi molecules. The antisense molecules and RNAi molecules may be prepared by any method known in the art for the synthesis of nucleic acid molecules. These include techniques for chemically synthesising oligonucleotides such as solid phase phosphoramidite chemical synthesis. Alternatively, said molecules may be generated by in vitro and in vivo transcription of DNA sequences.

[0026] Moreover, the compound used in step (a) of the method for identifying a compound capable of modulating the activity of the JAK/STAT pathway may also be selected from compounds capable of directly and/or indirectly inhibiting or activating a polypeptide molecule of (ii). Preferably, the compounds capable of directly and/or indirectly inhibiting or activating a polypeptide molecule of (ii) comprise polypeptides such as proteins, enzymes, antibodies, polypeptide inhibitors, polypeptide activators, agonist, antagonists, mimetics, oligopeptides, low molecular weight substances and polypeptide cofactors. More preferably, the compounds capable of directly and/or indirectly inhibiting or activating a polypeptide molecule of (ii) are antibodies or fragments thereof directed against a polypeptide molecule of (ii). Within the context of the present invention, the term “antibody”, as used herein, encompasses polyclonal antibodies, monoclonal antibodies, e.g. chimeric antibodies, humanized antibodies, human antibodies or recombinant antibodies, e.g. single-chain antibodies. Further, the term “antibody fragment” encompasses common antibody fragments, e.g. proteolytic fragments such as Fab, F(ab)₂, Fab′ or recombinant fragments such as scFv. The antibodies or fragments thereof may be obtained using hybridoma cell lines or recombinant DNA methods using techniques well known in the art. However, the antibodies or fragments thereof may also be isolated from phage antibody libraries using techniques described in the art.

[0027] According to the present invention, step (b) of the method for identifying a compound capable of modulating the activity of the JAK/STAT pathway comprises determining the degree of modulation of the at least one target molecule by the compound. Preferably, the degree of modulation of the at least one target molecule by the compound may be determined either by measuring the amount and/or expression rate of the nucleic acid molecules of (i) or by measuring the amount and/or activity of the polypeptide molecules of (ii). A variety of protocols including, for example, ELISA, RIA, and FACS, for measuring nucleic acid molecules and/or proteins are known in the art and provide a basis for measuring the amount and/or expression rate of a nucleic acid molecule or the amount and/or activity of a polypeptide molecule. Particularly, the capability of a substance to modulate the activity of the JAK/STAT pathway is determined as described in the Example.

[0028] According to the present invention, the method for identifying a compound capable of modulating the activity of the JAK/STAT pathway may be a molecular based assay or a cellular assay. Therefore, the at least one target molecule may be provided either in vivo in a cellular system, preferably a cellular system overexpressing the at least one target molecule, or in vitro in cell fractions containing the at least one target molecule or with the at least one target molecule in a substantially isolated and purified form. Methods for providing the at least one target molecule are well known in the art and may be used in performing the present invention. According to the present invention, it is preferred that the method for identifying a compound capable of modulating the activity of the JAK/STAT pathway is performed in a high-throughput format.

[0029] A second aspect of the present invention pertains to the use of at least one molecule selected from

(i) nucleic acid molecules, comprising
[0030] (i.1) a nucleotide sequence as shown in SEQ ID NOs. 88 to 265;
[0031] (i.2) a nucleotide sequence which is complementary to a nucleotide sequence of (i.1);
[0032] (i.3) a nucleotide sequence which has an identity of at least 65% to a nucleotide sequence of (i.1) or (i.2); and/or
[0033] (i.4) a nucleotide sequence which hybridizes under stringent conditions to a nucleotide sequence of (i.1), (i.2) or (i.3); and
   (ii) polypeptide molecules
[0034] (ii.1) encoded by the nucleic acid molecules of (i) and/or
[0035] (ii.2) having the sequences as shown in SEQ ID NOs. 1-87,
   as a target for the modulation of the activity of the JAK/STAT pathway.

[0036] Within the context of the present invention, the nucleic acid molecules of (i), comprising (i.1) a nucleotide sequence as shown in SEQ ID NOs. 88 to 265, (i.2) a nucleotide sequence which is complementary to a nucleotide sequence of (i.1), (i.3) a nucleotide sequence which has an identity of at least 65% to a nucleotide sequence of (i.1) or (i.2), and/or (i.4) a nucleotide sequence which hybridizes under stringent conditions to a nucleotide sequence of (i.1), (i.2) or (i.3), and the polypeptide molecules of (ii) encoded by the nucleic acid molecules of (i) used as afore-mentioned are as described above.

[0037] A third aspect of the present invention relates to a method for modulating the activity of the JAK/STAT pathway comprising contacting a cell with at least one molecule selected from

(i) nucleic acid molecules, comprising
[0038] (i.1) a nucleotide sequence as shown in SEQ ID NOs. 88 to 265;
[0039] (i.2) a nucleotide sequence which is complementary to a nucleotide sequence of (i.1);
[0040] (i.3) a nucleotide sequence which has an identity of at least 65% to a nucleotide sequence of (i.1) or (i.2); and/or
[0041] (i.4) a nucleotide sequence which hybridizes under stringent conditions to a nucleotide sequence of (i.1), (i.2) or (i.3);
   (ii) polypeptide molecules
[0042] (ii.1) encoded by the nucleic acid molecules of (i) and/or
[0043] (ii.2) having the sequences as shown in SEQ ID NOs. 1-87; and
   (iii) effector molecules of (i) and/or (ii).

[0044] The method for modulating the activity of the JAK/STAT pathway may suitably be performed as molecular based assay or cellular assay. Preferably, the cell used in the method for modulating the activity of the JAK/STAT pathway is a cell showing the JAK/STAT pathway, e.g. an animal cell.

[0045] According to the present invention, the nucleic acid molecules of (i), comprising (i.1) a nucleotide sequence as shown in SEQ ID NOs. 88 to 265, (i.2) a nucleotide sequence which is complementary to a nucleotide sequence of (i.1), (i.3) a nucleotide sequence which has an identity of at least 65% to a nucleotide sequence of (i.1) or (i.2), and/or (i.4) a nucleotide sequence which hybridizes under stringent conditions to a nucleotide sequence of (i.1), (i.2) or (i.3), and the polypeptide molecules of (ii) encoded by the nucleic acid molecules of (i) used according to the method for modulating the activity of the JAK/STAT pathway are as described above.

[0046] Moreover, the effector molecules of (i) and/or (ii) used according to the method for modulating the activity of the JAK/STAT pathway are selected from polypeptides such as proteins, enzymes, antibodies, polypeptide inhibitors, polypeptide activators, agonist, antagonists, mimetics, oligopeptides, cofactors, low molecular weight substances, antisense molecules, RNAi molecules and ribozymes. Preferably, the effector molecules of (i) and/or (ii) are compounds identified by the method for identifying compounds of modulating the activity of the JAK/STAT pathway described above. More preferably, the effector molecules of (i) and/or (ii) are antibodies or fragments thereof directed against a polypeptide molecule of (ii), antisense molecules directed against a nucleic acid molecule of (i) and/or RNAi molecules.

[0047] Further, the present invention is concerned in a fourth aspect with a pharmaceutical composition comprising as an active agent at least one molecule selected from

(i) nucleic acid molecules, comprising
[0048] (i.1) a nucleotide sequence as shown in SEQ ID NOs. 88 to 265;
[0049] (i.2) a nucleotide sequence which is complementary to a nucleotide sequence of (i.1);
[0050] (i.3) a nucleotide sequence which has an identity of at least 65% to a nucleotide sequence of (i.1) or (i.2); and/or
[0051] (i.4) a nucleotide sequence which hybridizes under stringent conditions to a nucleotide sequence of (i.1), (i.2) or (i.3);
   (ii) polypeptide molecules
[0052] (ii.1) encoded by the nucleic acid molecules of (i) and/or
[0053] (ii.2) having the sequences as shown in SEQ ID NOs. 1-87; and
   (iii) effector molecules of (i) and/or (ii).

[0054] According to the present invention, the nucleic acid molecules of (i), comprising (i.1) a nucleotide sequence as shown in SEQ ID NOs. 88 to 265, (i.2) a nucleotide sequence which is complementary to a nucleotide sequence of (i.1), (i.3) a nucleotide sequence which has an identity of at least 65% to a nucleotide sequence of (i.1) or (i.2), and/or (i.4) a nucleotide sequence which hybridizes under stringent conditions to a nucleotide sequence of (i.1), (i.2) or (i.3), the polypeptide molecules of (ii) encoded by the nucleic acid molecules of (i) and the effector molecules (of (iii)) of (i) and/or (ii) comprised in the pharmaceutical composition of the invention are as described above.

[0055] In addition to the at least one active ingredient, the pharmaceutical composition of the invention may contain suitable pharmaceutically acceptable carriers, diluents and/or adjuvants, which facilitate processing of the active ingredient into preparations, which can be used pharmaceutically. Further details on techniques for formulation and administration may be found in the latest edition of Remington's Pharmaceutical Sciences (Maack Publishing Co., Easton, Pa.).

[0056] The pharmaceutical composition of the present invention is particularly suitable for the diagnosis, prevention or treatment of a JAK/STAT pathway associated disorder. Preferably, the JAK/STAT pathway associated disorder is selected from the group consisting of papillary thyroid carcinoma, Refsum disease, blood-brain barrier glucose transport defect, X-linked nonsyndromic mental retardation, long QT syndrome 4, subcortical laminar heterotopia, leukemia, steroid-resistant nephrotic syndrome, invasive pituitary tumor, sporadic Sotos syndrome, autosomal dominant iron overload, hereditary pancreatitis, stomatocytosis I, atypical Rett syndrome, phosphoglycerate dehydrogenase deficiency, Wolman disease, neurophysiologic defect in schizophrenia, autosomal recessive SCID (T-negative/B-positive type), atelostogenesis (type I), Larson syndrome, spondylocarpotarsal synostosis syndrome, frontometaphyseal dysplasia, diabetes mellitus (type II), susceptibility to insulin resistance, Griscelli Syndrome, limb-girdle muscular dystrophy (type 2A), growth hormone insensitivity with immunodeficiency and breast cancer.

[0057] In one embodiment of the present invention the pharmaceutical composition is used for the prevention or treatment of a JAK/STAT pathway associated disorder. Pharmaceutical compositions suitable for the prevention or treatment of a JAK/STAT pathway associated disorder include compositions wherein the at least one active ingredient is contained in an effective amount to achieve the intended purpose. The determination of an effective dose is well within the capability of those skilled in the art. For any compounds, the therapeutically effective dose can be estimated initially either in cell culture assays or in animal models, usually mice, rabbits, dogs or pigs. The animal model may also be used to determine the appropriate concentration range and route of administration. Such information can then be used to determine useful doses and routes for administration in humans.

[0058] The actual amount of the pharmaceutical composition administered, will of course, be dependent on the subject being treated, on the subject's weight, the severity of the JAK/STAT pathway associated disorder, the manner of administration and the judgement of the prescribing physician. For the pharmaceutical composition of the invention, a daily dosage of 1 to 200 mg of the at least one active ingredient per kg and day, particularly 10 to 100 mg of the at least one active ingredient per kg and day, is suitable. Suitable routes of administration may, for example, include oral, intravenous, intramuscular, intraarterial, intramedullary, intrathecal, intraventricular, transdermal, subcutaneous, intraperitoneal, intranasal, enteral, topical, sublingual or rectal administrations. Preferably, the subject being treated is an animal, in particular a human being.

[0059] In another embodiment of the present invention the pharmaceutical composition is used for the diagnosis of a JAK/STAT pathway associated disorder, e.g. a disorder characterized by or associated with the over- or underexpression of a nucleic acid molecule of (i) or a polypeptide molecule of (ii). Diagnostic assays include methods which utilize the pharmaceutical composition and a label to detect the nucleic acid molecule of (i) or polypeptide molecule of (ii) in human body fluids or extracts of cells or tissues.

[0060] Finally, a further aspect of the present invention relates to the use of at least one molecule selected from

(i) nucleic acid molecules, comprising
[0061] (i.1) a nucleotide sequence as shown in SEQ ID NOs. 88 to 265;
[0062] (i.2) a nucleotide sequence which is complementary to a nucleotide sequence of (i.1);
[0063] (i.3) a nucleotide sequence which has an identity of at least 65% to a nucleotide sequence of (i.1) or (i.2); and/or
[0064] (i.4) a nucleotide sequence which hybridizes under stringent conditions to a nucleotide sequence of (i.1), (i.2) or (i.3);
   (ii) polypeptide molecules
[0065] (ii.1) encoded by the nucleic acid molecules of (i) and/or
[0066] (ii.2) having the sequences as shown in SEQ ID NOs. 1-87; and
   (iii) effector molecules of (i) and/or (ii);
   for the manufacture of a pharmaceutical composition for the diagnosis, prevention or treatment of a JAK/STAT pathway associated disorder.

[0067] According to the present invention, the nucleic acid molecules of (i), comprising (i.1) a nucleotide sequence as shown in SEQ ID NOs. 88 to 265, (i.2) a nucleotide sequence which is complementary to a nucleotide sequence of (i.1), (i.3) a nucleotide sequence which has an identity of at least 65% to a nucleotide sequence of (i.1) or (i.2), and/or (i.4) a nucleotide sequence which hybridizes under stringent conditions to a nucleotide sequence of (i.1), (i.2) or (i.3), the polypeptide molecules of (ii) encoded by the nucleic acid molecules of (i) and the effector molecules (of (iii)) of (i) and/or (ii) used according to the present invention for the manufacture of a pharmaceutical composition for the diagnosis, prevention or treatment of a JAK/STAT pathway associated disorder are as described above.

[0068] Moreover, according to the present invention, the pharmaceutical composition and the JAK/STAT pathway associated disorder are as described above.

[0069] Methods for the manufacture of a pharmaceutical composition, comprising the step of admixing at least one molecule selected from nucleic acid molecules of (i), comprising (i.1) a nucleotide sequence as shown in SEQ ID NOs. 88 to 265, (i.2) a nucleotide sequence which is complementary to a nucleotide sequence of (i.1), (i.3) a nucleotide sequence which has an identity of at least 65% to a nucleotide sequence of (i.1) or (i.2), and/or (i.4) a nucleotide sequence which hybridizes under stringent conditions to a nucleotide sequence of (i.1), (i.2) or (i.3), polypeptide molecules of (ii) encoded by the nucleic acid molecules of (i) and effector molecules (of (iii)) of (i) and/or (ii) with a pharmaceutically acceptable excipient, vehicle or carrier and optionally other ingredients are well known to those skilled in the art and may be used in performing the present invention.

[0070] Further, the present invention shall be explained by the following Tables, Figures and Example.

### Tables

[0071] Table 1 shows the RNAi JAK/STAT phenotypes.

[0072] Table 2 shows the functional groups classified by InterPro prediction and GO.

[0073] Table 3 shows the genetic interactions with hop^{Tuml}.

[0074] Table 4 shows sequence and cytological information.

[0075] Table 5 shows human homologues of Drosophila genes with JAK/STAT phenotypes.

[0076] Table 6 shows human disease homologues of Drosophila genes with JAK/STAT phenotypes.

[0077] Supplementary Table 7 shows the expected and observed phenotype frequency.

[0078] Table 7 shows preferred human JAK/STAT homologues ranked according to their involvement in a human disease.

[0079] Table 8 shows evolutionary and functional conservation of JAK/STAT pathway components.

### FIGURES

[0080] FIG. 1 shows the genome-wide RNAi screen for JAK/STAT signalling factors. a: Schematic representation of the Drosophila JAK/STAT signalling pathway. b: Knock-down of known JAK/STAT components leads to loss of pathway induction by Upd whereas knock-down of lacZ, toll and relish show no effect. The red line indicates a 70-fold reporter induction relative to negative control dsRNA. Error bars represent standard deviations of six experiments. c: Screening approach. 20,026 dsRNA were screened in duplicate in 384-well plates prior to computational analysis and retesting. FL: firefly luciferase (indicated in red); RL: Renilla luciferase (indicated in yellow) d: Q-Q plot of normally distributed quantiles against actual screening result quantiles in the pathway reporter channel. A perfect fit to a normal distribution is represented by the red line. Tails of positively and negatively interacting dsRNAs at each extreme with a z-score threshold of >2 and <−2 represent RNAi experiments with significant phenotypes (p<0.05).

[0081] FIG. 2 shows the analysis of JAK/STAT activity modulators. a: Schematic representation of positive (red) and negative (green) regulator loci distributed within the Drosophila genome. An interactive version of this panel is available at http://www.dkfz.de/signaling/jak-pathway/cytomap.php. b: Distribution of predicted gene functions. c: Epistasis analysis of the indicated positive pathway regulators showing interactions graded from none (yellow) to strong (red). Results shown have been obtained in two independent octuplicate experiments. Upd: Upd ectopic expression; Upd-CM: Upd conditioned medium; hop^{Tuml}: expression of a constitutively active JAK-allele. Colour coding of z-scores is shown in the key.

[0082] FIG. 3 shows that dBRWD3 functions as a JAK/STAT pathway component. a: Domain structure and sequence similarity of Drosophila and human BRWD3 proteins. Percentages show the similarity in the amino acid sequence and regions targeted by two independent dsRNAs independently recovered in the screen are shown. b: Adult Drosophila heads heterozygous for the GMR-updA3′ transgene crossed to wild type (left), stat92E (middle) and dBRWD3 mutants (right). Note the strong reduction in eye size following removal of pathway components. c: hop^{Tuml} induced tumour formation is significantly decreased in both size and frequency of tumours in stat92E and dBRWD3 heterozygous backgrounds. d: By comparison to adult wild type wings (left), ectopic wing vein material (arrow) is present in homozygous dBRWD3^{Δ10} mutant (a putative hypomorphic allele, right), a phenotype reminiscent of the stat92EH^{HJ} mutant.

[0083] FIG. 4 shows that Ptp61F is a tumour suppressor in vivo. a: Epistasis analysis of ptp61F dsRNA in cell culture revealed that it acts downstream of Hop and upstream or parallel to STAT92E. b: Haemocyte specific misexpression of ptp61F can protect hop^{Tuml} mutants from melanotic tumour formation. Compare large black tumours in controls (arrow heads, left) with small tumours present in ptp61F expressing individual (right). c: Quantitative analysis of large tumour formation in hop^{Tuml} mutants expressing cytoplasmic Ptp61Fa and nuclear Ptp61Fc shows specificity of rescue for the nuclear isoform (left), an effect that is mirrored by over-expression of the same isoforms in tissue culture based reporter assays (right). Error bars represent standard deviations of 3 or 4 independently tested transgenic lines or eight parallel cell culture experiments.

[0084] FIG. 5 shows an overview of primary RNAi screen data. a: False colour representation of the genome-wide screen showing averaged z-scores for each well present in the fifty seven 384-well duplicate plates. Key indicates the colours associated with the z-scores: −4 (red) represents a strong decrease in reporter activity, +4 (blue) represents an increase in activity. Four controls were included in the top left corner of each plate and are visible in all plates except 1 and 9 for which these dsRNA controls failed. b: False colour representation of average z-scores for a representative example from the genome-wide screen (plate 34). Controls present in the lop left corner of each plate were hop (A1), dome (A2), stat92E (B1) and socs36E (B2). dsRNAs from the library were present in all other wells including position B07 which targets hopscotch. L10 which targets CG2033 was excluded from the final list because of a cell viability phenotype previously identified in both Kc and S2R+ cells (Boutros, M. et al., Science 303, 832-5 (2004)). Similarly, 102 and G20 (which both target sbr/CG17335) were excluded due to variability in retesting and a previously described bi-nucleate phenotype (Kiger, A. A. et al., J Biol 2, 27 (2003)). Colour coding for z-scores is shown in the key and uses the same scheme shown in a. c: Histogram of z-scores for the genome-wide screen indicates that the majority of dsRNA experiments do not modify JAK/STAT signaling activity.

[0085] FIG. 6 shows the loss of JAK/STAT pathway components and hop^{Tuml} induced tumour formation. hop^{Tuml}/+; +/+ females (top) frequently contain large black melanotic tumours (arrows). hop^{Tuml}/+;stat92E⁰⁶³⁴²/+ heterozygotes which lack one copy of stat92E (middle) contain fewer and smaller tumours. hop^{Tuml}/+;dBRWD3⁰⁵⁸⁴²/+ (bottom) also contain fewer and smaller tumours. Flies were grown in parallel independent experiments at 25° C. and are representative examples of the individuals recovered (see Table 3 for further information).

[0086] FIG. 7 shows a heat-map showing human JAK/STAT pathway regulating genes identified. Data shown are: the original Drosophila interactions (col 1) expressed as z-scores, fold change in the expression levels of STAT1 and STAT3 target genes (col 2 & 3, respectively) and the levels of phosphorylated STAT1 and STAT3 (col 4 & 5, respectively). In all columns black represents a decrease, white an increase and grey no change in activity.

### EXAMPLE

[0087] Signalling pathways mediating the transduction of information between cells are essential for development, cellular differentiation and homeostasis (Brivanlou, A. H. & Darnell, J. E., Jr., Science 295, 813-8. (2002)). Their dysregulation is also frequently associated with human malignancies. The JAK/STAT pathway represents one such signalling cascade whose evolutionarily conserved roles include cell proliferation and haematopoiesis (Hombria, J. C. & Brown, S., Curr Biol 12, R569-75 (2002)). Here, the inventors of the present invention describe a systematic genome-wide survey for genes required for JAK/STAT pathway activity. Analysis of 20,026 RNAi-induced phenotypes in cultured Drosophila melanogaster haemocyte-like cells identified interacting genes encoding 4 known and 84 previously uncharacterised proteins. Subsequently, cell based epistasis experiments have been used to classify these based on their interaction with known components of the signalling cascade. In addition to multiple human disease gene homologues, the inventors of the present invention have identified the tyrosine phosphatase Ptp61F and the Drosophila homologue of BRWD3, a bromo-domain containing protein disrupted in leukaemia (Kalla, C. et al., Genes Chromosomes Cancer 42, 128-43 (2005)). Moreover, in vivo analysis demonstrates that disrupted dBRWD3 and overexpressed Ptp61F function as suppressors of leukaemia-like blood cell tumours. This screen represents a comprehensive identification of novel loci required for JAK/STAT signalling and provides molecular insights into an important pathway relevant for human diseases.

### 1. Experimental Procedures

### 1.1. Constructs and Pathway Reporter

[0088] The JAK/STAT firefly luciferase reporter 6x2xDrafLuc was constructed by multimerisation of a molecularly characterised STAT92E binding site present in the promoter of the endogenous target genes Draf (Kwon, E. J. et al., J Biol Chem 275, 19824-19830 (2000)) while the 4xsocsLuc reporter is based on a single region containing four potential STAT92E binding sites present within the first intron of socs36E (Karsten, P., Hader, S. & Zeidler, M. P., Mech Dev 117, 343-6 (2002)). A Renilla luciferase reporter gene under the control of the constitutively active Actin5C promoter was co-transfected and used to monitor cell number.

[0089] Strictly speaking, the JAK/STAT reporter 6x2xDrafLuc was constructed by multimerisation of STAT92E binding sites. Specifically, a 165 bp blunted BamHI/Xbal fragment from the original p2xDrafSTAT(wt) (Kwon, E. J. et al., J Biol Chem 275, 19824-19830 (2000)) (a kind gift of M. Yamaguchi and M.A. Yoo) was inserted into the Smal cut p2xDrafSTAT(wt). The same fragment was amplified by PCR with NotI sites on both ends and inserted into compatible sites to yield the 3x2xDrafLuc reporter containing six STAT92E binding sites. These fragments were amplified again and the resulting 540 bp fragment was inserted into the Sacl cut 3x2xDrafLuc vector to generate the 6x2xDrafLuc reporter with an enhancer of approximately 1000 bp containing a total of 12 STAT92E binding sites. A second independent JAK/STAT pathway reporter, 4xsocsLuc, was generated by amplifying a 745 bp product from genomic DNA using the primers 5′-GTTAGGTACCGGGTCGCAGTATCGTTGGCG-3′ and 5′-CGMGGATCC CTGTCACTTCTCAGAAATCGGTC-3′. This was then cut with EcoRI/BamHI to give a 285 bp fragment, subcloned into pBS(KS+) (Stratagene) and re-excised with Asp718/BamHI. This 340 bp fragment, containing four predicted STAT92E binding sites (Karsten, P., Hader, S. & Zeidler, M., Mech Dev 117, 343. (2002)), was cloned into Asp718/BgIII sites of pGL3 vector (Promega).

[0090] The pAct-RL vector expressing Renilla luciferase from a constitutive reporter was generated by cloning a 974 bp fragment coding for Renilla luciferase from pRLSV40 (Invitrogen) into the BamHI/Xbal cut pP_{Ac5c}-PL vector (a kind gift from Dan Curtis). To generate the pAct-UpdGFP vector, a cDNA coding for Upd (Harrison, D. A., Binari, R., Nahreini, T. S., Gilman, M. & Perrimon, N., Embo J 14, 2857-65 (1995)) was fused in frame to EGFP via a BamHI site and inserted into the BamHI/Xbal cut pP_{Ac5c}-PL vector. A vector expressing the dominant gain-of-function allele Hop^{TumL} was cloned by inserting the open reading frame obtained from pUAS-hop^{TumL} (Harrison, D. A., Binari, R., Nahreini, T. S., Gilman, M. & Perrimon, N., Embo J 14, 2857-65 (1995)) into the NotI/Xbal cut pAc5.1A vector (Invitrogen). A pAc5.1-Sid-1 expression construct which was used to facilitate uptake of dsRNA was a gift of Craig Hunter (Feinberg, E. H. & Hunter, C. P., Science 301, 1545-7 (2003)).

[0091] To generate Ptp61F. expression constructs, cDNAs encoding Ptp61Fc (LP01280) and Ptp61Fa (RE01370) were obtained from the DrosophilaGenomics Resource Center (University of Indiana). cDNA clones were analysed by restriction analysis and end sequencing to confirm their integrity before subcloning into pAc5.1A and pUAST (Brand, A. H. & Perrimon, N., Development 118, 401-15 (1993)). For Ptp61Fc, the coding region of LP01280 was excised as an EcoRI/XhoI (partial digest) fragment of 1.8 kb and cloned into pUAST. Subsequently, the insert was re-excised with EcoRI/Xbal and cloned into pAc5.1A (Invitrogen). For Ptp61Fa, the coding region of RE01370 was cut out with EcoRI/Asp718(filled) and cloned into pAc5.1A cut EcoRI/Xbal(filled). The generate a pUAST construct, an EcoRI/Asp718 fragment was used.

[0092] To clone p[w⁺,UAS-dPIAS-GFP], the EST clone LD09022 was used as a template in conjunction with the oligos 5′-CATCGGATCCTGCAAAAAGGGG TCCAACGTACC GGAT-3′ and 5′-GGGGTACCAAAAATGGTGCATATGCTT CGA-3′ to amplify a region coding for 522 amino acids. The resulting product was sequenced, cut with Asp718/BamHI and subcloned into pBS-EGFP-B to generate an in frame C-terminal EGFP fusion protein. This gene was then subcloned as an Asp718/Xbal fragment into pUAST (Brand, A. H. & Perrimon, N., Development 118, 401-15 (1993)).

[0093] Multiple independent transgenic Drosophila stocks of each transformation vector construct were generated by microinjection of embryos using standard techniques (Spradling, A. C. & Rubin, G. M., Science 218, 341-347 (1982)).

### 1.2. Genome-Wide RNAi Screening

[0094] A genome-wide RNAi library based on PCR templates with an average length of 408 bp flanked by T7-promotor binding sites was generated by in vitro transcription (Boutros, M. et al., Science 303, 832-5 (2004)). Therefore, PCR fragments containing T7 promoter sequences on each end (Hild, M. et al., Genome Biol 5, R3 (2003)) were used as templates to generate 20,026 dsRNAs by in vitro transcription (Boutros, M. et al., Science 303, 832-5 (2004)). After DNAse I treatment, dsRNAs were purified by ethanol precipitation and individually quality controlled by gel electrophoresis. RNAs were diluted to a working stock concentration and aliquoted in ready-to-screen 384-well tissue culture plates (Greiner). Computational mapping predict that the 20,026 RNA fragments target >91% of all predicted genes in the Drosophila genome (Annotation 4.0) (Misra, S. et al., Genome Biol 3, RESEARCH0083-3 (2002)). Protocols and supplemental material can be found at http://www.dkfz-heidelberg.de/signaling/jak-pathway/. Complete primer and amplicon sequence information for double-stranded RNAs including calculation of predicted efficiency and off-target effects for the RNAi library is publicly accessible at http://rnai.dkfz.de.

[0095] For screening experiments, Drosophila Kc₁₆₇ cells were maintained in Schneider's medium (Invitrogen) supplemented with 10% foetal bovine serum (PAA) and 100 μg/ml penicillin-streptomycin (Invitrogen). Cells were grown at 25° C. at subconfluent densities. The RNAi screening experiments were performed in white, polystyrene 384-well tissue culture plates (Greiner 781 073). A total of fiftyseven 384-well screening plates were loaded with an average of 75 nM (500 ng) dsRNA in 5 μl of 1 mM Tris pH 7. Kc₁₆₇ cells were transfected in batch in 6-well plates with 0.25 μg of the 6x2xDrafLuc JAK/STAT signalling reporter, 0.6 μg of pAct-UpdGFP expression vector, 0.25 μg pAc5.1-Sid-1 (to facilitate RNA uptake (Feinberg, E. H. & Hunter, C. P., Science 301, 1545-7 (2003))) and 0.025 μg of pAct-RL vector as a co-reporter. The total plasmid amount was normalised to 2 μg with a pAc5.1 plasmid (Invitrogen) and 5×10⁶ cells were transfected with Effectene (Qiagen). After 7 hours incubation at 25° C., batch transfected cells were resuspended in serum-free medium. Subsequently 15,000 cells in 20 μl were dispensed per dsRNA containing well using an automated liquid dispenser (MultiDrop, Thermo Labsystems). Cells were incubated for 45 min and 30 μl of serum-containing medium was added to each well. Cells were grown for 5 days to allow for protein depletion. Pathway activity was measured for using a luminescence assay for firefly and Renilla luciferase on a Mithras LB940 plate reader (Berthold Technologies). Luminescence of the Renilla luciferase was measured using a 490 nm filter set. Screens were performed in duplicate. Each plate contained dsRNA targeting stat92E, dome, hop and socs36E in A1, A2, B1, B2 which were used as positive controls (see also FIG. 5b). For retests, an independent JAK/STAT pathway reporter (4xsocsLuc) was used which contained a STAT-binding site from the endogenous JAK/STAT-pathway target socs36E (Karsten, P., Hader, S. & Zeidler, M., Mech Dev 117, 343. (2002)).

[0096] To identify candidate genes that significantly increase or decrease JAK/STAT signalling pathway activity, the raw luciferase results were normalised by median centering of each 384-well plate (separately by channel). Z-scores were calculated as the number standard deviation that a particular well differed from the median of the 384-well plate. To minimise false negatives, the inventors of the present invention applied a set of low-stringency criteria to generate a list of candidate genes to be used in specific retests. First, the inventors filtered dsRNA treatments with z-scores >2 for negative regulators or <−2 for positive regulators, respectively. Treatments that showed a high variability between duplicates were excluded. Further, RNAi experiments that showed z-scores of >2 or <−2 in the control channel were not selected for retesting. The inventors also filtered against previously identified cell viability modifiers that show a phenotype in cultured Drosophila cells (Boutros, M. et al., Science 303, 832-5 (2004)). The inventors also excluded genes that showed phenotypes in other screens. These filtering steps led to a final list of approximately 107 candidates that were selected for retesting. New dsRNA was re-synthesized as described above and repeat assays were performed in quadruplicate. 89 of the candidates were confirmed using a second JAK/STAT reporter assay (4xsocsLuc) employed to exclude reporter-specific artefacts. Data analysis and representation were performed using R and Bioconductor (Gentleman, R. C. et al., Genome Biol 5, R80 (2004)).

[0097] The predicted genes targeted by 91 dsRNAs were classified according to InterPro (Mulder, N. J. et al., Nucleic Acids Res 33 Database Issue, D201-5 (2005)) and GO (Harris, M. A. et al., Nucleic Acids Res 32, D258-61 (2004); Drysdale, R. A. et al., Nucleic Acids Res 33 Database Issue, D390-5 (2005)) and manual inspection was used to order genes into functional groups. Predicted proteins without InterPro domain or GO annotation were classified as “Unknown” although these sequences might encode structurally conserved proteins. To determine whether Drosophila proteins have homologues in other species, the inventors used BLASTP searches against the protein predictions from H. sapiens (NCBI build 35) with a cut-off of E<10⁻¹⁰. Databases were obtained from Ensembl (http://www.ensembl.org) (Clamp, M. et al., Nucleic Acids Res 31, 38-42 (2003)) and Flybase (hftp://www.flybase.org) (Drysdale, R. A. et al., Nucleic Acids Res 33 Database Issue, D390-5 (2005)). Reciprocal best BLASTP analysis was used to identify the human homologue of CG31132. CG31132 and human BRWD3 are classified as orthologous pairs by InParanoid (http://inparanoid.cgb.ki.se/).

### 1.3. Cell-Based Epistasis Experiments

[0098] To undertake epistasis experiments, cells were transfected with vectors to stimulate pathway activity (see below) for 7 hours and 30,000 cells in 50 μl of serum-free medium were seeded into wells of clear bottom 96-well plates (Greiner), which contained 1.5 μg of the dsRNAs to be tested (listed in FIG. 2c). Following 1 hour incubation, 75 μl medium supplemented with 10% foetal bovine serum was added to the cells, plates were sealed and cells lysed after 5 days to measure luciferase activities.

[0099] Each dsRNA was tested for its ability to suppress pathway activity under three conditions: (1) in Upd-expressing cells (screening conditions), (2) in cells treated with Upd-conditioned medium (Upd-CM), and (3) in cells expressing the activated form of JAK, Hop^{Tuml} (Harrison, D. A., Binari, R., Nahreini, T. S., Gilman, M. & Perrimon, N., Embo J 14, 2857-65 (1995); Luo, H., Hanratty, W. P. & Dearolf, C. R., Embo J 14, 1412-20 (1995)). Specifically, for Upd overexpression 5×10⁶ Kcl₆₇ cells were transfected with 600 ng pAct-UpdGFP, 500 ng 6x2xDrafLuc reporter, 250 ng pAc5.1-Sid-1, 25 ng pAct-RL and pAc5.1 to a total of 2 μg DNA. For Hop^{TumL} overexpression, 5×10⁶ Kc₁₆₇ cells were transfected with 200 ng pAct-hop^{TumL}, 500 ng 6x2xDrafLuc reporter, 250 ng pAc5.1-Sid-1, 25 ng pAct-RL and pAc5.1 to a total of 2 μg DNA. To analyse processes upstream of Upd, two batches of cells were transfected separately to generate ‘responder’ and ‘Upd-producer’ cells. The ‘responder’ cells were batch transfected with 500 ng 6x2xDrafLuc reporter, 250 ng pAc5.1-Sid-1, 25 ng pAct-RL and pAc5.1 to a total of 2 μg plasmid DNA and subsequently seeded into 96-well plates containing the respective dsRNAs as described above. The ‘Upd-producing’ cells were transfected with 2 μg pAct-UpdGFP and cultured in 10 cm dishes (Falcon). Three days after transfection, cells were treated with 50 μg/ml Heparin (Sigma). After 24 hours, the supernatant was harvested, cleared by centrifugation and passed through a 0.2 μm filter (Millipore). 50 μl of this Upd-conditioned medium were then used to stimulate pathway activity in the ‘responder’ cells for 24 hours. Control medium from untransfected Heparin treated cells did not elicit pathway activity (not shown).

[0100] Experiments were performed in eight replicates and repeated at least twice. Reporter activity in the firefly luciferase channel was divided by the Renilla luciferase channel to normalise for cell number. Z-scores were calculated as the multiples of the standard deviation that a specific RNAi treatment differed from cells treated with lacZ dsRNA as negative controls. Z-scores were subsequently transformed into a false-colour representations as depicted in FIG. 2c.

[0101] RNA controls as shown in FIG. 2c were in vitro transcribed from PCR templates generated using the following gene-specific primer sequences: 5T7lacZ: GAATAATACGACTCACTATAGGGAGACAGTGGCGTCTGGCGGAAAA (SEQ ID NO. 448), 37lacZ: GMTTMTACGACTCACTATAGGGAGATCCGAGCC AGTTTACCCGCT (SEQ ID NO. 449), 5T7gfp: TMTACGACTCACTATAGGACGGC CGCCATTMCMGCAAAAG (SEQ ID NO. 450) and 3T7gfp: TAATACGACTCACT ATAGGCTGGGCGGAGCGGATGATG (SEQ ID NO. 451). Note that the gfp dsRNA was used to target the Upd-GFP transgene and leads to a loss-of pathway activity. lacZ dsRNA was used as a negative control.

[0102] For epistasis analysis of the putative negative regulator ptp61F, cells were batch transfected with reporter and Upd inducer as described above. Subsequently, these cells were treated with 1.5 μg of dsRNA targeting the ptp61F transcript and 1.5 μg of dsRNA against lacZ, dome, hop or stat92E. In parallel, cells from the same transfection batch were treated with lacZ, dome, hop or stat92E dsRNAs alone. After normalisation, the values of experiments with control dsRNA alone were set to one. To examine the JAK/STAT phenotype of ptp61F in cells, 5×10⁶ Kc₁₆₇ cells were transfected with 0.6 μg pAct-UpdGFP, 0.5 μg 6x2xDrafLuc reporter, 0.25 μg pAc5.1-Sid-1, 0.025 μg pAct-RL and pAc5.1 to a total of 2 μg DNA. To assess the effects of the different Ptp61F splice forms, cells were transfected as described before with additional 0.5 μg of pAct-Ptp61Fa, pAct-Ptp61Fc or vector control, respectively. JAK/STAT pathway activation was expressed in relation to control cells.

### 1.4. Genetics

[0103] A P-element insertion termed I(3)05842 (Spradling, A. C. et al., Genetics 153, 135-77 (1999)) was identified in the fourth intron of dBRWD3/CG31132 as part of a Flybase search (Drysdale, R. A. et al., Nucleic Acids Res 33 Database Issue, D390-5 (2005)). A I(3)05842 stock was obtained from the Bloomington stock centre (University of Indiana). The P-element insertion I(3)05842 is homozygous lethal and fails to complement the Df(3R)crb874 and Df(3R)crb87-5 deficiencies. Twenty three independent stocks in which the ry⁺ marker present in the P[ry⁺,PZ] insertion had been lost following a cross to a transposase source were established. Of these, seven were viable revertants (30%) and include two stocks with the wing vein phenotype (FIG. 3d), two are semi-lethal with occasional escapers and the remainder were lethal.

[0104] For genetic interaction assays, females of the stock y,w,hop^{Tuml}/FM7; P [w⁺,cg-Gal4.A]2 (Harrison, D. A., Binari, R., Nahreini, T. S., Gilman, M. & Perrimon, N., Embo J 14, 2857-65 (1995)) were crossed to wild type controls (OreR and w¹¹¹⁸) and mutations in stat92E and I(3)05842. The haemocyte specific Gal4 driver line P[w⁺,cg-Gal4.A]2 allowed specific UAS insertions to be tested for their potential influence on tumour formation. Transgenic animals expressing UAS-EGFP or UAS-β-galactosidase were used as negative controls while UAS-dPIAS-EGFP served as a positive control (Betz, A., Lampen, N., Martinek, S., Young, M. W. & Darnell, J. E., Jr., Proc Natl Acad Sci USA 98, 9563-8 (2001)) (see Table 3).

[0105] Crosses were incubated at 25° C. and adult females heterozygous for the hop^{Tuml} chromosome were scored within 24 hours of eclosion for the presence of tumours classified as small (one or two small melanotic spots as shown in FIG. 4b [right]) or large (one or more large melanised growths or more than three small spots; FIG. 4b [left]). Survival rates for hop^{Tuml} females appear to be independent of tumour frequency at the time point counted (not shown). Assays were repeated at least twice for each genotype and a representative example from one experiment is shown (FIG. 4b).

[0106] Genetic interaction with P[w⁺,GMR-updΔ3′]′19 was undertaken as described in Genetics 165, 1149-66 ((2003), Bach, E. A., Vincent, S., Zeidler, M. P. & Perrimon, N.) using OreR and STAT92E⁰⁶³⁴⁶ as negative and positive controls, respectively. Suppression of P[w⁺,GMR-updΔ3′]′19 induced eye overgrowth by dBRWD3⁰⁵⁸⁴² was observed in multiple independent experiments in a majority of individuals of the appropriate genotype. Drosophila heads were photographed using a Zeiss STEMI 2000-C binocular microscope and Axiocam camera.

### 2. Results and Discussion

[0107] Developmental genetic screens in Drosophila have identified multiple JAK/STAT pathway components on the basis of their segmentation phenotype (Binari, R. & Perrimon, N., Genes Dev 8, 300-12. (1994); Harrison, D. A., McCoon, P. E., Binari, R., Gilman, M. & Perrimon, N., Genes Dev 12, 3252-63. (1998); Hou, X. S., Melnick, M. B. & Perrimon, N., Cell 84, 411-9 (1996)) and subsequent analysis of the pathway has characterised evolutionarily conserved roles during immune responses, haematopoiesis and cellular proliferation (Lagueux, M., Perrodou, E., Levashina, E. A., Capovilla, M. & Hoffmann, J. A., Proc Natl Acad Sci USA 97, 11427-32. (2000); Boutros, M., Agaisse, H. & Perrimon, N., Dev Cell 3, 711-22. (2002); Meister, M. & Lagueux, M., Cell Microbiol 5, 573-580 (2003); Mukherjee, T., Castelli-Gair Hombria, J. & Zeidler, M. P., Oncogene in press (2005)). The JAK/STAT signalling cascade in Drosophila is comprised of the extracellular ligand Unpaired (Upd) (Harrison, D. A., McCoon, P. E., Binari, R., Gilman, M. & Perrimon, N., Genes Dev 12, 3252-63. (1998)), a trans-membrane receptor with homology to the IL6 receptor family termed Domeless (Dome) (Brown, S., Hu, N. & Castelli-Gair Hombria, J., Curr Biol 11, 1700-5. (2001)), a single Janus tyrosine kinase (JAK) called Hopscotch (Hop) (Binari, R. & Perrimon, N., Genes Dev 8, 300-12. (1994)) and the STAT92E transcription factor (Hou, X. S., Melnick, M. B. & Perrimon, N., Cell 84, 411-9 (1996); Yan, R., Small, S., Desplan, C., Dearolf, C. R. & Darnell, J. E., Jr., Cell 84, 421-30 (1996)) (FIG. 1a). Known regulators of JAK/STAT signalling including a family of SOCS-like genes (Callus, B. A. & Mathey-Prevot, B.; Oncogene 21, 4812-4821 (2002); Karsten, P., Hader, S. & Zeidler, M. P., Mech Dev 117, 343-6 (2002)), dPIAS/Su(var)2-10 (Betz, A., Lampen, N., Martinek, S., Young, M. W. & Darnell, J. E., Jr., Proc Natl Acad Sci USA 98, 9563-8 (2001)) and STAM (Mesilaty-Gross, S., Reich, A., Motro, B. & Wides, R., Gene 231, 173-86 (1999)) are functionally conserved and were identified based on their homology to components originally characterised in mammalian cell culture studies (Hombria, J. C. & Brown, S., Curr Biol 12, R569-75 (2002)). Although successful in identifying the pathway members Upd, Dome, Hop and STAT92E, it is probable that forward genetic approaches have missed components possibly due to non-saturating mutagenesis, genetic redundancy or phenotypic pleiotropy (Nagy, A., Perrimon, N., Sandmeyer, S. & Plasterk, R., Nat Genet 33 Suppl, 276-84 (2003)).

[0108] In order to identify novel pathway components and circumvent limitations of classical genetic screens, the inventors of the present invention have undertaken a genome-wide RNA interference (RNAi) screen, a powerful technique for the identification of new components of diverse cellular pathways (Kamath, R. S. et al., Nature 421, 231-7 (2003); Kittler, R. et al., Nature 432, 1036-40 (2004); Berns, K. et al., Nature 428, 431-7 (2004); Paddison, P. J. et al., Nature 428, 427-31 (2004); Boutros, M. et al., Science 303, 832-5 (2004)). To this end, the inventors devised a quantitative assay for JAK/STAT signalling activity in cultured Drosophila cells by multimerising a STAT92E-binding site from the Draf promotor (Kwon, E. J. et al., J Biol Chem 275, 19824-19830 (2000)) to generate the 6x2xDrafLuc firefly luciferase reporter. Given the role for JAK/STAT signalling in haematopoiesis (Meister, M. & Lagueux, M., Cell Microbiol 5, 573-580 (2003)), the inventors used Drosophila hemocyte-like Kc₁₆₇ cells due to their endogenous ability to respond to pathway activation (FIG. 1b). On transfection of the 6x2xDrafLuc reporter and a plasmid to constitutively express the ligand Upd, a robust induction of the reporter gene activity was observed (FIG. 1b). The inventors first examined whether depletion of known pathway components by RNAi (Clemens, J. C. et al., Proc Natl Acad Sci U S A 97, 6499-6503 (2000)) modifies JAK/STAT signalling activity in Kc₁₆₇ cells. The inventors assessed the effect of double-stranded (ds) RNAs targeting the mRNA of the genes dome, stat92E and hop, as well as dsRNAs directed against the negative regulators socs36E and dPIAS. As shown in FIG. 1b, knock down of JAK/STAT components results in significant changes in reporter activity while reporter activity in uninduced cells remains at low levels (FIG. 1b).

[0109] The inventors then set out to systematically identify genes required for JAK/STAT signalling by generating a library of 20,026 dsRNAs targeting 91% of the predicted transcripts in the Drosophila genome. Using this library the inventors performed duplicate genome-wide screens as outlined in FIGS. 1c and 5. After computational analysis (FIG. 1d), dsRNAs targeting candidates were resynthesised and assayed with an independent reporter, derived from the promoter of the pathway target gene socs36E (Karsten, P., Hader, S. & Zeidler, M. P., Mech Dev 117, 343-6 (2002)) to exclude reporter specific artefacts. These approaches confirmed the identification of 71 dsRNAs which decrease pathway activity (targeting putative positive regulators) and 19 dsRNAs which increase pathway activity (putative negative regulators) (see Table 1). While most modifiers are distributed throughout the genome (FIG. 2a), the X chromosome is devoid of negative regulators, a finding which may be linked to the role of the pathway in Drosophila sex determination (Sefton, L., Timmer, J. R., Zhang, Y., Beranger, F. & Cline, T. W., Nature 405, 970-3 (2000)).

[0110] Based on InterPro and GO annotations, pathway modifiers were classified according to their predicted functions. Signalling factors, enzymes mediating post-translational protein modifications and transcription factors cumulatively represent 47% of the genes identified (FIG. 2b). Furthermore, 74% of the identified loci possess human homologues (E-value <10⁻¹⁰), 33% of which have been implicated in human disease (Tables 5 and 6). Examples of genes identified in the screen include CG11501 encoding a putatively secreted negative regulator of JAK/STAT signalling previously demonstrated to be a pathway target gene (Boutros, M., Agaisse, H. & Perrimon, N., Dev Cell 3, 711-22. (2002)), enok/CG11290 encoding an acetyl-transferase and the tumor suppressor protein 101/CG9712 gene which encodes a ubiquitin conjugating enzyme. The molecular role of these genes in the regulation of JAK/STAT signalling remains to be determined.

[0111] A genetic technique to characterise signalling molecules is the determination of their epistatic relationship with respect to defined pathway components. The inventors therefore performed cell-based epistatic assays to determine the pathway response to Upd expression, Upd conditioned medium or expression of the constitutively active JAK allele hop^{Tuml} (Harrison, D. A., McCoon, P. E., Binari, R., Gilman, M. & Perrimon, N., Genes Dev 12, 3252-63. (1998); Sefton, L., Timmer, J. R., Zhang, Y., Beranger, F. & Cline, T. W., Nature 405, 970-3 (2000)) while simultaneously targeting a subset of positive regulators. In this way, dsRNA-inactivated genes required upstream in the pathway can be characterised on the basis of their rescue by pathway activation further downstream (FIG. 2c). For example, while depletion of the interferon-related protein encoded by CG15401 results in down-regulation of signalling stimulated by Upd expression, stimulation by Upd conditioned medium or hop^{Tuml} is unaffected (FIG. 2c). This suggests that CG15401 is required for the production and/or activity of the Upd ligand. Conversely, loss of pathway activity resulting from the knock down of CG18670 and CG6400 (now annotated as one gene termed CG31132) cannot be rescued by any form of pathway stimulus implying a function downstream of JAK (FIG. 2c). Although this analysis suggests a role for multiple genes upstream of Dome, this classification is based on the lack of interaction observed under the differing experimental conditions and the molecular basis of these results remains to be confirmed.

[0112] In order to confirm the function of candidate genes in vivo, the inventors tested examples of both positive and negative regulators of the JAK/STAT signalling pathway. One positive regulator mentioned above is CG31132 which encodes a 2232 amino acid WD40 and bromo-domain containing protein homologous to human BRDW3 (FIG. 3a). BRDW3 is a functionally uncharacterised locus recently identified at the break point of t(X;11) (q13;q23) translocations derived from multiple B-cell chronic lymphocytic leukaemia (B-CLL) patients (Kalla, C. et al., Genes Chromosomes Cancer 42, 128-43 (2005)). In the screen, reduction of pathway activity was observed for two independent dsRNAs present in the library that target different regions of the transcript (FIG. 3a).

[0113] A previously uncharacterised mutagenic P-element inserted in the fourth intron of CG31132 (henceforth termed dBRDW3⁰⁵⁸⁴²) has been deposited in public stock collections as part of the Drosophila genome project and remobilisation of this transposon indicates that the insertion is responsible for late embryonic lethality. The inventors therefore tested for genetic interactions between dBRDW3 and JAK/STAT signalling by crossing the dBRDW3⁰⁵⁸⁴² allele to GMR-updΔ3′ (Bach, E. A., Vincent, S., Zeidler, M. P. & Perrimon, N., Genetics 165, 1149-66 (2003)). The GMR-upd□3′ transgene ectopically misexpress Upd during eye development resulting in cellular overproliferation and an enlarged adult eye (FIG. 3b (left)). Furthermore, removal of one copy of stat92E significantly suppresses eye overgrowth (FIG. 3b (middle)) due to a reduction in the potency of JAK/STAT signalling (Bach, E. A., Vincent, S., Zeidler, M. P. & Perrimon, N., Genetics 165, 1149-66 (2003)). Removal of a single copy of dBRDW3 was also able to suppress the GMR-updΔ3′ phenotype (FIG. 3b (right)) as expected for a positive regulator of JAK/STAT signalling. In addition, a chromosomal deficiency removing the region has also been independently identified as a suppressor of GMR-updΔ3′ (Bach, E. A., Vincent, S., Zeidler, M. P. & Perrimon, N., Genetics 165, 1149-66 (2003)).

[0114] One phenotypic consequence of constitutive JAK/STAT activation caused by the gain-of-function JAK allele hop^{Tuml} is the overproliferation of haemocytes and the frequent formation of melanotic tumours, a phenotype previously described as a Drosophila model for leukaemia (Luo, H., Hanratty, W. P. & Dearolf, C. R., Embo J 14, 1412-20 (1995); Harrison, D. A., Binari, R., Nahreini, T. S., Gilman, M. & Perrimon, N., Embo J 14, 2857-65 (1995)). The inventors found that the removal of one copy of dBRWD3 is sufficient to reduce the size and the frequency of hop^{Tuml} induced melanotic tumours (FIG. 3c and Table 3). Moreover, homozygous escapers of a putative hypomorphic allele of dBRWD3, generated by excision of the original P-element, frequently develop ectopic wing vein material (FIG. 3d) reminiscent of the weak loss-of-function stat92E^{HJ} allele (Yan, R., Luo, H., Darnell, J. E., Jr. & Dearolf, C. R., Proc Natl Acad Sci USA 93, 5842-7 (1996)). Taken together, these experiments suggest a role for dBRWD3 in JAK/STAT signalling.

[0115] As a second example the inventors analysed the ptp61F gene which encodes a protein tyrosine phosphatase. dsRNA knocking down all mRNA splice forms transcribed from this locus leads to an increase in JAK/STAT signalling activity. The inventors performed epistasis analysis in which the inventors removed known pathway components and tested for the effect of simultaneously targeting ptp61F. Double RNAi against ptp61F together with lacZ, dome or hop results in pathway stimulation (FIG. 4a). However, simultaneous removal of ptp61F and stat92E is sufficient to prevent signalling (FIG. 4a). Loss of this phosphatase therefore results in the stimulation of STAT92E activity even in the absence of upstream components indicating that Ptp61F negatively regulates the pathway downstream of JAK. The inventors next asked whether Ptp61F also interferes with JAK/STAT signalling in vivo by using the cg-Gal4 driver to misexpress ptp61F in blood cells of hop^{Tuml} mutants. Misexpression of Ptp61Fc in a hop^{Tuml} mutant background resulted in a suppression of melanotic tumour formation with the average frequency of large tumours reduced by approximately 4 fold, an effect also observed following the misexpression of the known negative regulator dPIAS (Betz, A., Lampen, N., Martinek, S., Young, M. W. & Darnell, J. E., Jr., Proc Natl Acad Sci USA 98, 9563-8 (2001)) (FIG. 4b and Table 3). Alternative splicing of ptp61F leads to nuclear and cytoplasmic protein forms which both contain the same phosphatase domain (McLaughlin, S. & Dixon, J. E., J Biol Chem 268, 6839-42 (1993)). However, the tumour suppressor phenotype is only observed with nuclear Ptp61Fc (FIG. 4c), an effect that is reproduced by over-expression of the nuclear localised protein in cell culture (FIG. 4c). These results are consistent with our identification of ptp61F as a negative regulator of pathway activity and suggest that it may function by targeting phosphorylated, nuclear localised STAT92E for deactivation.

[0116] Aberrant JAK/STAT signalling has been implicated in multiple human malignancies and its components have been proposed as molecular targets for the development of therapeutic compounds (O'Shea, J. J., Pesu, M., Borie, D.C. & Changelian, P. S., Nat Rev Drug Discov 3, 555-64 (2004)). The genome-wide screen presented here identified known and previously unknown genes and the inventors have characterised their likely level of interaction with defined pathway components using cell-based epistasis analysis. Of the 89 JAK/STAT modifiers identified, many have human homologues that remain to be characterised. The inventors have here performed an analysis of two examples in vivo and demonstrate their roles in regulating the pathway during development and tumour genesis in Drosophila. One of these is a homologue of human BRWD3, a gene recently identified at the break-point of a translocation isolated from multiple B-CLL patients (Kalla, C. et al., Genes Chromosomes Cancer 42, 128-43 (2005)). Given our functional analysis of dBRWD3 and the known roles for JAK/STAT signalling during normal haematopoiesis, it is possible that a breakdown in BRWD3 mediated STAT regulation may represent a key molecular mechanism leading to the development of B-CLL. Thus, comprehensive reverse genetic surveys for signalling pathway components using Drosophilaas a model organism represent a potentially powerful approach with which insights relevant to human disease can be obtained.

### Example 2

[0117] Novel components regulating the JAK/STAT pathway in Drosophilamelanogaster have been previously been identified using a robust STAT92E responsive reporter assay in combination with genome-wide RNAi (Müller, P., Kuttenkeuler, D., Gesellchen, V. Zeidler, M.P. and Boutros M. (2005) “Identification of JAK/STAT signalling components by genome-wide RNAi” Nature 436 871-875). Having identified the essential components in Drosophila, a second crucial step is the identification of human functional orthologs. Given that many of the potential human orthologs have been implicated in human disease, these proteins, and the mRNAs that encode them, may represent targets for therapeutic interventions by small molecules or RNAi based approaches. Using a HeLa cell model we have assayed the activity of endogenous STAT1 and STAT3 following treatment with siRNA targeting potential pathway modulating genes. Assays of hSTAT phosphorylation state and the expression levels of their targets, have identified 27 human genes, which function as modulators of human JAK/STAT signal transduction. These have been ranked on the basis of potential significance and are listed in Table 7 together with the human diseases they have previously been associated with.

### Results

[0118] Compared to Drosophila, the JAK/STAT pathway in mammalians is much more complex in that multiple paralogs exist for the pathway ligand, receptor, JAK and STAT. As an initial approach towards identifying regulators of human JAK/STAT signaling, we have analyzed phenotypes caused by siRNA-mediated knockdown of candidate pathway modifiers in human cells. Human genes for this analysis were selected based on their homology to Drosophila JAK/STAT pathway regulators previously identified (Müller et al. 2005). Homology prediction by a variety of methods yielded 73 candidates homologous to 56 Drosophila genes. Pools of 4 siRNAs per candidate (Dharmacon SMARTpools) were used to ensure the efficiency and specificity of knockdown. As an easily tractable model, we have used human cancer-derived HeLa cells which express multiple STATs and which respond to stimulation by a variety of cytokine ligands (Ehret G.B., Reichenbach P., Schindler U., Horvath C.M., Fritz S., Nabholz M., Bucher P. (2001) “DNA binding specificity of different STAT proteins. Comparison of in vitro specificity with natural target sites” J Biol Chem 276 6675-6688).

[0119] Two approaches have been used to determine the activity of STAT1 and STAT3 in the HeLa cell system tested. Firstly, the levels of tyrosine-701-phosphorylated STAT1 (pSTAT1) and tyrosine-705-phosphorylated STAT3 (pSTAT3) were determined in HeLa cell lysates that had been stimulated with human Interferon gamma (INFγ) or Oncostatin M (OSM) for 15 min, respectively. These cells had previously been treated with siRNA targeting either controls or the putative pathway interactors for 72hs. After determination of the overall level of STAT1/3, the western blots were stripped and re-probed with pSTAT1 and pSTAT3 antibodies and with antibodies to determine β-ACTIN levels as a normalization control. The relative levels of pSTAT1/3 versus STAT1/3 were assessed with regard to the overall level of β-ACTIN detected and a call made representing either an increase in PSTAT levels (+), a decrease in PSTAT (−) or no change (FIG. 7 column 4 & 5).

[0120] As a second independent approach to determine the level of STAT1 and STAT3 activity, the expression levels of the previously characterized pathway target genes GBPI (a STAT1 target) and SOCS3 (a STAT3 target) were determined 6 hrs after stimulation of HeLa cells with INFy and OSM, respectively. As before, cells had previously been treated with siRNA targeting either controls or putative pathway regulators for 72 hrs. Target gene levels were determined using branched DNA technology (QuantiGene, Panomics) and normalized to the level of β-actin mRNA. Results from duplicate assays are expressed as fold changes in target gene expression levels relative to cells treated with control siRNA. Statistically significant changes in response (p<0.05) are shown in black (decrease in expression level) or white (increase in expression) (FIG. 7 column 2 & 3, Table 8 column 5 & 6). In this table the scores relating to hSTAT1 and hSTAT3 target genes are expressed such that 1 is the expression level induced by pathway ligands following treatment with a control siRNA. Numbers below 1 therefore indicate a reduction in expression while scored above 1 represent an increase. Scores for Drosophila STAT92E are expressed as z-scores—a measure of statistical significance in which significant suppression of activity is represented by numbers <−2.0 while significant enhancement is represented by values >+2.0. Statistically significant changes are indicated by the change in colour of the boxes shown in FIG. 7. Note that only genes which interact via at least one assay are shown and other human homologues of interacting Drosophila genes not listed did not show any interaction with the STAT1 or STAT3 assays used.

[0121] Analysis of these two independent data sets, in conjunction with the scores originally obtained for the Drosophila orthologs (FIG. 7 column 1 and Table 8, column 4) has identified positively acting factors that are required for both STAT1 & 3 as well as factors that are required specifically by only STAT1 or STAT3. In addition negatively acting factors acting on either or both STATs have been found. Finally, some factors act positively for one STAT and negatively for another (this may be a result of redundancy within the pathway) while others act as positive regulators in Drosophila but as negative regulators in human cells. This analysis has lead to the compilation of a list of human genes playing a role in the regulation of human JAK/STAT signaling (Table 7). These genes have been ranked by order of interest (highest at the top; Table 7) as judged by criteria such as involvement in human disease, predicted sub-cellular localization and strength of interaction.

TABLE 1
JAK/STAT phenotypes by RNAi

| | | | | | | | |
|---|---|---|---|---|---|---|---|
| | | z-score | z-score | | | | |
| | | [6 × 2 × Draf- | [4 × SOCS- | Functional group assignment (based on GO | Interpro 8.0 | | |
| Gene name | dsRNA ID | luc] | luc] | and Interpro evidence) | evidence | GO Evidence | SEQ ID NO. |

Positive Regulators

| | | | | | | | |
|---|---|---|---|---|---|---|---|
| Art2 | HFA00627 | −2.9 | −3.2 | Protein modifying enzymes/Metabolism | IPR000051 | GO: 0016274; protein-arginine N-methyltransferase activity | SEQ ID NO. 175 |
| asf1 | HFA11324 | −2.3 | −2.5 | Others | IPR008967 | GO: 0003682; chromatin binding | SEQ ID NO. 176 |
| bin3 | HFA04919 | −3.1 | −3.3 | Unknown | IPR000051 | na; na | SEQ ID NO. 177 |
| CG10007 | HFA14173 | −3.2 | −2.9 | Unknown | noIPR | na; na | SEQ ID NO. 178 |
| CG10730 | HFA02102 | −2.1 | −2.3 | Unknown | IPR004245 | na; na | SEQ ID NO. 179 |
| CG10960 | HFA09807 | −2.0 | −2.1 | Protein modifying enzymes/Metabolism | IPR005829 | GO: 0005355; glucose transporter activity | SEQ ID NO. 180 |
| CG11307 | HFA11648 | −2.3 | −2.4 | Unknown | noIPR | GO: 0016757; transferase activity | SEQ ID NO. 181 |
| CG11696 | HFA19417 | −2.0 | −2.3 | Transcription regulators | IPR007087 | GO: 0003677; DNA binding | SEQ ID NO. 182 |
| CG12213 | HFA14478 | −3.3 | −3.2 | Unknown | IPR009053 | na; na | SEQ ID NO. 183 |
| CG12460 | HFA20970 | −3.3 | −3.4 | Transcription regulators | IPR000504 | GO: 0030528; transcription regulator activity | SEQ ID NO. 184 |
| CG12479 | HFA19459 | −2.3 | −2.4 | Unknown | IPR007512 | na; na | SEQ ID NO. 185 |
| CG13243 | HFA01920 | −2.7 | −2.6 | Unknown | IPR003117 | na; na | SEQ ID NO. 186 |
| CG13473 | HFA10017 | −2.4 | −2.1 | Cytoskeleton and Transport | IPR006662 | GO: 0005489; electron transporter activity | SEQ ID NO. 187 |
| CG14434 | HFA17927 | −2.0 | −2.3 | Unknown | IPR008173 | na; na | SEQ ID NO. 188 |
| CG15306 | HFA17993 | −3.3 | −3.1 | Signal transduction | IPR001715 | GO: 0005102; receptor binding | SEQ ID NO. 189 |
| CG15418 | HFA00432 | −2.1 | −2.1 | Protein modifying enzymes/Metabolism | IPR002223 | GO: 0004866; endopeptidase inhibitor activity | SEQ ID NO. 190 |
| CG15434 | HFA00449 | −2.5 | −2.9 | Protein modifying enzymes/Metabolism | IPR007741 | GO: 0003954; NADH dehydrogenase activity | SEQ ID NO. 191 |
| CG15555 | HFA15093 | −2.3 | −2.6 | Others | IPR001873 | GO: 0015268; alpha-type channel activity | SEQ ID NO. 192 |
| CG15784 | HFA18090 | −2.4 | −2.6 | Unknown | IPR009072 | na; na | SEQ ID NO. 193 |
| CG16903 | HFA18561 | −2.8 | −2.8 | Transcription regulators | IPR011028 | GO: 0016251; general RNA polymerase II transcription factor activity | SEQ ID NO. 194 |
| CG17179 | HFA10258 | −2.1 | −2.8 | Unknown | IPR001680 | na; na | SEQ ID NO. 195 |
| CG18160 | HFA21006 | −3.1 | −2.4 | Unknown | noIPR | na; na | SEQ ID NO. 196 |
| CG30069 | HFA06272 | −2.9 | −2.2 | Protein modifying enzymes/Metabolism | noIPR | GO: 0016491; oxidoreductase activity | SEQ ID NO. 197 |
| CG3058 | HFA00563 | −3.4 | −3.5 | Cytoskeleton and Transport | IPR006663 | GO: 0005489; electron transporter activity | SEQ ID NO. 198 |
| CG31005 | HFA15507 | −2.3 | −3.0 | Protein modifying enzymes/Metabolism | IPR000092 | GO: 0000010; trans-hexaprenyltranstransferase activity | SEQ ID NO. 199 |
| CG31132 | HFA16032 | −2.8 | −3.5 | Unknown | IPR001487 | na; na | SEQ ID NO. 200 |
| CG31132 | HFA15369 | −2.3 | −3.6 | Unknown | IPR001487 | na; na | SEQ ID NO. 201 |
| CG31358 | HFA15235 | −2.0 | −2.2 | Cytoskeleton and Transport | IPR001972 | GO: 0005200; structural constituent of cytoskeleton | SEQ ID NO. 202 |
| CG31694 | HFA00415 | −2.8 | −2.7 | Signal transduction | IPR006921 | GO: 0005102; receptor binding | SEQ ID NO. 203 |
| CG32406 | HFA09966 | −2.1 | −2.2 | Signal transduction | IPR000980 | na; na | SEQ ID NO. 204 |
| CG32573 | HFA19906 | −3.1 | −2.9 | Unknown | IPR000719 | na; na | SEQ ID NO. 205 |
| CG3281 | HFA15470 | −3.1 | −3.0 | Transcription regulators | IPR007087 | GO: 0030528; transcription regulator activity | SEQ ID NO. 206 |
| CG3819 | HFA10378 | −2.3 | −2.3 | Unknown | IPR001604 | na; na | SEQ ID NO. 207 |
| CG4022 | HFA10395 | −3.4 | −3.7 | Unknown | noIPR | na; na | SEQ ID NO. 208 |
| CG40351 | HFA20930 | −2.6 | −2.7 | Transcription regulators | IPR001214 | GO: 0030528; transcription regulator activity | SEQ ID NO. 209 |
| CG4349 | HFA19892 | −4.1 | −2.1 | Others | IPR009040 | GO: 0008199; ferric iron binding | SEQ ID NO. 210 |
| CG4446 | HFA10420 | −2.7 | −2.7 | Protein modifying enzymes/Metabolism | IPR004625 | GO: 0008478; pyridoxal kinase activity | SEQ ID NO. 211 |
| CG4653 | HFA19909 | −3.2 | −3.0 | Protein modifying enzymes/Metabolism | IPR001254 | GO: 0004263; chymotrypsin activity | SEQ ID NO. 212 |
| CG4781 | HFA04488 | −2.5 | −2.5 | Unknown | IPR003591 | na; na | SEQ ID NO. 213 |
| CG6422 | HFA16036 | −3.3 | −3.2 | Unknown | IPR007275 | na; na | SEQ ID NO. 214 |
| CG6434 | HFA10635 | −2.8 | −2.8 | Unknown | IPR001680 | na; na | SEQ ID NO. 215 |
| CG6946 | HFA16145 | −2.3 | −2.9 | RNA processing and Translation | IPR000504 | GO: 0003723; RNA binding | SEQ ID NO. 216 |
| CG7635 | HFA20054 | −2.9 | −2.8 | Cytoskeleton and Transport | IPR001972 | GO: 0005200; structural constituent of cytoskeleton | SEQ ID NO. 217 |
| CG8108 | HFA09675 | −2.7 | −2.7 | Transcription regulators | IPR007087 | GO: 0003676; nucleic acid binding | SEQ ID NO. 218 |
| CG9086 | HFA20148 | −2.8 | −2.9 | Signal transduction | IPR009030 | GO: 0005057; receptor signaling protein activity | SEQ ID NO. 219 |
| CkIIalpha | HFA11946 | −2.1 | −2.5 | Signal transduction | IPR000719 | GO: 0004702; receptor signaling protein serine/threonine kinase activity | SEQ ID NO. 220 |
| CkIIbeta | HFA20230 | −2.7 | −2.6 | Signal transduction | IPR000704 | GO: 0004702; receptor signaling protein serine/threonine kinase activity | SEQ ID NO. 221 |
| comm3 | HFA09995 | −2.2 | −2.2 | Unknown | noIPR | na; na | SEQ ID NO. 222 |
| CtBP | HFA16617 | −2.9 | −2.8 | Transcription regulators | IPR006139 | GO: 0003714; transcription corepressor activity | SEQ ID NO. 223 |
| dome | HFA19583 | −6.2 | −4.9 | Signal transduction | IPR000194 | GO: 0004907; interleukin receptor activity | SEQ ID NO. 224 |
| eIF-4B | HFA20983 | −3.2 | −3.0 | RNA processing and Translation | IPR000504 | GO: 0003723; RNA binding | SEQ ID NO. 225 |
| HDC01676 | HFA01091 | −2.3 | −2.6 | Unknown | IPR006202 | na; na | SEQ ID NO. 226 |
| HDC11198 | HFA11427 | −2.3 | −2.2 | Unknown | noIPR | na; na | SEQ ID NO. 227 |
| hop | HFA20340 | −5.7 | −4.1 | Signal transduction | IPR001245 | GO: 0004718; Janus kinase activity | SEQ ID NO. 228 |
| Ipk2 | HFA00357 | −2.6 | −4.0 | Signal transduction | IPR005522 | GO: 0050516; inositol-polyphosphate multikinase activity | SEQ ID NO. 229 |
| jbug | HFA04167 | −2.7 | −3.2 | Cytoskeleton and Transport | IPR001298 | GO: 0005200; structural constituent of cytoskeleton | SEQ ID NO. 230 |
| kn | HFA07637 | −2.4 | −2.4 | Transcription regulators | IPR003523 | GO: 0030528; transcription regulator activity | SEQ ID NO. 231 |
| l(1)G0084 | HFA19450 | −2.1 | −2.1 | Transcription regulators | IPR001965 | GO: 0003677; DNA binding | SEQ ID NO. 232 |
| larp | HFA16984 | −2.5 | −2.4 | Unknown | IPR006630 | na; na | SEQ ID NO. 233 |
| mask | HFA15370 | −2.3 | −2.7 | Signal transduction | IPR002110 | GO: 0005102; receptor binding | SEQ ID NO. 234 |
| mst | HFA20582 | −2.2 | −2.6 | Unknown | noIPR | na; na | SEQ ID NO. 235 |
| nonA | HFA20357 | −3.0 | −3.3 | RNA processing and Translation | IPR000504 | GO: 0030528; transcription regulator activity | SEQ ID NO. 236 |
| Obp93a | HFA15220 | −2.4 | −2.9 | Cytoskeleton and Transport | IPR006170 | GO: 0005549; odorant binding | SEQ ID NO. 237 |
| Rrp1 | HFA00784 | −4.3 | −4.3 | Others | IPR000097 | GO: 0004520; endodeoxyribonuclease activity | SEQ ID NO. 238 |
| sol | HFA20587 | −2.5 | −3.0 | Others | IPR001876 | GO: 0005516; calmodulin binding | SEQ ID NO. 239 |
| Stat92E | HFA16870 | −5.0 | −5.2 | Signal transduction | IPR001217 | GO: 0004871; signal transducer activity | SEQ ID NO. 240 |
| Taf2 | HFA11298 | −2.7 | −2.9 | Transcription regulators | IPR002052 | GO: 0016251; general RNA polymerase II transcription factor activity | SEQ ID NO. 241 |

Negative regulators

| | | | | | | | |
|---|---|---|---|---|---|---|---|
| bon | HFA16914 | 5.6 | 4.8 | Protein modifying enzymes/Metabolism | IPR001841 | GO: 0004842; ubiquitin-protein ligase activity | SEQ ID NO. 242 |
| Caf1 | HFA16596 | 3.0 | 2.6 | Protein modifying enzymes/Metabolism | IPR001680 | GO: 0035035; histone acetyltransferase binding | SEQ ID NO. 243 |
| CG10077 | HFA09691 | 2.8 | 4.0 | RNA processing and Translation | IPR001410 | GO: 0003724; RNA helicase activity | SEQ ID NO. 244 |
| CG11400 | HFA06070 | 2.6 | 2.2 | Unknown | noIPR | na; na | SEQ ID NO. 245 |
| CG11501 | HFA14317 | 3.7 | 3.1 | Unknown | noIPR | na; na | SEQ ID NO. 246 |
| CG13499 | HFA04144 | 2.5 | 3.1 | Unknown | noIPR | na; na | SEQ ID NO. 247 |
| CG14247 | HFA14742 | 3.2 | 3.4 | Unknown | IPR002557 | na; na | SEQ ID NO. 248 |
| CG15706 | HFA06577 | 2.2 | 2.1 | Unknown | IPR011701 | na; na | SEQ ID NO. 249 |
| CG16975 | HFA02552 | 2.7 | 2.7 | Transcription regulators | IPR001660 | GO: 0030528; transcription regulator activity | SEQ ID NO. 250 |
| CG17492 | HFA02623 | 2.5 | 2.1 | Protein modifying enzymes/Metabolism | IPR001841 | GO: 0004842; ubiquitin-protein ligase activity | SEQ ID NO. 251 |
| CG18112 | HFA15304 | 2.1 | 2.1 | Unknown | IPR001829 | na; na | SEQ ID NO. 252 |
| CG30122 | HFA06935 | 3.3 | 2.8 | Transcription regulators | IPR003034 | GO: 0003677; DNA binding | SEQ ID NO. 253 |
| CG4907 | HFA15673 | 3.3 | 3.5 | Unknown | IPR007070 | na; na | SEQ ID NO. 254 |
| dre4 | HFA08714 | 2.6 | 2.5 | Transcription regulators | IPR000994 | GO: 0003712; transcription cofactor activity | SEQ ID NO. 255 |
| enok | HFA04096 | 3.0 | 3.0 | Transcription regulators | IPR001965 | GO: 0030528; transcription regulator activity | SEQ ID NO. 256 |
| lig | HFA07247 | 2.2 | 2.1 | Unknown | IPR009060 | na; na | SEQ ID NO. 257 |
| Nup154 | HFA03384 | 2.9 | 2.9 | Cytoskeleton and Transport | IPR011045 | GO: 0005487; nucleocytoplasmic transporter activity | SEQ ID NO. 258 |
| par-1 | HFA07660 | 4.4 | 4.2 | Signal transduction | IPR000719 | GO: 0004674; protein serine/threonine kinase activity | SEQ ID NO. 259 |
| Pp1alpha-96A | HFA16795 | 3.0 | 3.8 | Signal transduction | IPR006186 | GO: 0004722; protein serine/threonine phosphatase activity | SEQ ID NO. 260 |
| PP2A-B′ | HFA16344 | 2.6 | 2.5 | Signal transduction | IPR002554 | GO: 0008601; protein phosphatase type 2A regulator activity | SEQ ID NO. 261 |
| Ptp61F | HFA08683 | 5.9 | 8.1 | Signal transduction | IPR000863 | GO: 0004725; protein tyrosine phosphatase activity | SEQ ID NO. 262 |
| Rab5 | HFA00777 | 2.1 | 2.1 | Signal transduction | IPR001806 | GO: 0005525; GTP binding | SEQ ID NO. 263 |
| Socs36E | HFA02455 | 3.2 | 2.3 | Signal transduction | IPR000980 | GO: 0007259; JAK-STAT cascade | SEQ ID NO. 264 |
| TSG101 | HFA11098 | 3.1 | 3.4 | Protein modifying enzymes/Metabolism | IPR001440 | GO: 0004842; ubiquitin-protein ligase activity | SEQ ID NO. 265 |

InterPro Evidence was obtained from: Mulder et al. (2005). InterPro, progress and status in 2005.
GO Evidence was obtained from: R. A. Drysdale, M. A. Crosby and The FlyBase Consortium (2005). FlyBase: genes and gene models. Nucleic Acids Research 33: D390-D395. http://flybase.org/
All 384-well screening plates contained dsRNAs against known JAK/STAT pathway components.
Controls for the 57 screening plates were stat92E RNAI (identified 55 times), hop RNAi (identified 37 times), dome RNAi (identified 55 times) and socs36E RNAi (identified 45 times)
An Interactive table with links to the Interpro records is available at http://www.dkfz.de/signaling/jak-pathway/

TABLE 2
Functional groups classified by InterPro prediction and GO.

| Functional Group^{†} | N* |
|---|---|
| Signalling factors | 17 |
| Transcription factors | 14 |
| Protein modification and Metabolism | 12 |
| Cytoskeleton and Transport | 7 |
| All others | 9 |
| Predicted proteins classified as part of a | 59 |
| Predicted proteins without classification | 31 |

Queries were performed with InterPro 8.0
^{†}InterPro and GO results classified into one of functionally related groups. See Table 1 for complete list of genes, specific IPR domains and GO assigned within each group.
*Number of proteins identified with InterPro domains and/or GO found in 90 translated gene sequences.

SUPPLEMENTARY TABLE 3
Genetic interactions with hop^{Tuml (1)}

| | | Insert/ | Tumours (%) | | | | |
|---|---|---|---|---|---|---|---|
| Exp | Genotype | Allele | None | Small | Large | n | z-score |
| I | y, w, hop^{Tuml}/+; +/+ | OreR | 31.0 | 50.6 | 18.4 | 358 | −0.4⁽*⁾ |
| II | y, w, hop^{Tuml}/+; +/+ | OreR | 31.0 | 43.8 | 25.2 | 445 | −0.4⁽*⁾ |
| II | y, w, hop^{Tuml}/+; +/+ | w1118 | 23.9 | 31.2 | 44.9 | 356 | 0.6⁽*⁾ |
| II | y, w, hop^{Tuml}/+; STAT92E/+ | 397 | 67.5 | 21.5 | 11.0 | 228 | −5.3⁽²⁾ |
| I | y, w, hop^{Tuml}/+; STAT92E/+ | 06346 | 68.6 | 26.1 | 5.3 | 283 | −5.4⁽³⁾ |
| II | y, w, hop^{Tuml}/+; STAT92E/+ | 06346 | 64.2 | 26.6 | 9.2 | 282 | −4.9⁽³⁾ |
| II | y, w, hop^{Tuml}/+; dBRWD3/+ | 05842 | 56.6 | 24.4 | 19.0 | 221 | −3.8 |
| I | y, w, hop^{Tuml}/+; cg-Gal4/UAS-EGFP | 5a.2 | 19.9 | 35.1 | 45.0 | 151 | 1.2⁽*⁾ |
| II | y, w, hop^{Tuml}/+; cg-Gal4/UAS-EGFP | 6a.3 | 41.0 | 33.3 | 25.7 | 451 | −1.7⁽*⁾ |
| II | y, w, hop^{Tuml}/+; cg-Gal4/UAS-lacZ | BG4-1-2 | 25.8 | 26.4 | 47.8 | 341 | 0.4⁽*⁾ |
| II | y, w, hop^{Tuml}/+; cg-Gal4/UAS-ptp61Fa | 1b.2 | 46.5 | 27.7 | 25.7 | 101 | −2.5 |
| I | y, w, hop^{Tuml}/+; cg-Gal4/UAS-ptp61Fa | 1b.2 | 46.5 | 29.1 | 24.3 | 230 | −2.5 |
| I | y, w, hop^{Tuml}/+; cg-Gal4/UAS-ptp61Fa | 1a.3 | 22.6 | 28.8 | 48.6 | 177 | 0.8 |
| II | y, w, hop^{Tuml}/+; cg-Gal4/UAS-ptp61Fa | 1a.3 | 19.6 | 24.4 | 56.0 | 168 | 1.2 |
| II | y, w, hop^{Tuml}/+; cg-Gal4/UAS-ptp61Fa | 3a.3 | 35.8 | 28.5 | 35.8 | 165 | −1.0 |
| I | y, w, hop^{Tuml}/+; cg-Gal4/UAS-ptp61Fa | 7a.3 | 16.4 | 36.1 | 47.5 | 61 | 1.6 |
| II | y, w, hop^{Tuml}/+; cg-Gal4/UAS-ptp61Fc | 1a.1 | 68.2 | 21.4 | 10.4 | 280 | −5.4 |
| II | y, w, hop^{Tuml}/+; cg-Gal4/UAS-ptp61Fc | 2a.4 | 56.1 | 30.6 | 13.3 | 255 | −3.8 |
| I | y, w, hop^{Tuml}/+; cg-Gal4/UAS-ptp61Fc | 2a.4 | 52.3 | 40.7 | 7.0 | 344 | −3.2 |
| I | y, w, hop^{Tuml}/+; cg-Gal4/UAS-ptp61Fc | 2b.3 | 59.4 | 33.8 | 6.8 | 234 | −4.2 |
| II | y, w, hop^{Tuml}/+; cg-Gal4/UAS-ptp61Fc | 2b.3 | 63.3 | 29.3 | 7.3 | 300 | −4.7 |
| II | y, w, hop^{Tuml}/+; cg-Gal4/UAS-dPIAS-GFP | 26b.3 | 67.0 | 27.4 | 5.7 | 106 | −5.2⁽⁴⁾ |
| I | y, w, hop^{Tuml}/+; cg-Gal4/UAS-dPIAS-GFP | 26b.3 | 63.1 | 33.6 | 3.3 | 122 | −4.7⁽⁴⁾ |

Values shown represent percentage of 0-24 hr old female flies containing no, small or large tumours visible in abdomen or thorax. Table shows results from two independent experiments (first column) undertaken under identical conditions.
⁽*⁾‘wild type’ results used to calculate z-scores
References:
⁽¹⁾Hanratty, W. P. & Dearolf, C. R. The Drosophila Tumorous-lethal hematopoietic oncogene is a dominant mutation in the hopscotch locus. Mol Gen Genet 238, 33-7 (1993).
⁽²⁾Silver, D. L. & Montell, D. J. Paracrine signaling through the JAK/STAT pathway activates invasive behavior of ovarian epithelial cells in Drosophila. Cell 107, 831-841 (2001).
⁽³⁾Hou, X. S., Melnick, M. B. & Perrimon, N. Marelle acts downstream of the Drosophila HOP/JAK kinase and encodes a protein similar to the mammalian STATs. Cell 84, 411-9 (1996).
⁽⁴⁾Betz, A., Lampen, N, Martinek, S., Young, M. W. & Darnell, J. E. Jr. A Drosophila PIAS homologue negatively regulates stat92E. Proc Natl Acad Sci USA 98, 9563-8 (2001).

TABLE 4
Sequence and cytological information

| dsRNA ID | Amplicon primer 1A | Ampilcon primer 2 |
|---|---|---|
| HFA00627 | TGC CTG TTT TCT GGA AAT ATG | CTC GCT GGG TTT CAT GGT |
| HFA11324 | TCG AAC TCA CGT TCG AGT | ATC ATC TTC GGG ATG GAT AAC |
| HFA04919 | GAG ATA CCC CGT GAT GAC A | CTT GGG AAT ACG CAC AAA GA |
| HFA16914 | AGG TGC TGG TGG AAA AGA A | ACC CGT CAC CCG GAA AG |
| HFA16596 | TAT TTG CTG TCA GCC TCT G | TGG TCC GTC CTC AGC ATC |
| HFA14173 | CGC CCT GAT CTT TGT GGG | GGA CGA GTA CAT CGC AAT G |
| HFA09691 | GCA CCA CCT CGT TGA AGA | GGG CAG CCA CAT CGG T |
| HFA02102 | GAA CTT CAT TTG GAA GCG TTT | CTT GCG CCG GAA CCA G |
| HFA09807 | GCC GCC GGT ACC GTC | AAG TAG GTG GGC GAT TCC |
| HFA11648 | CCG TGG CCA CAG GAA CA | CAG TCC TGT TCA TGT GGA AAT |
| HFA06070 | TTG TCT GGC TGT GTC TGT C | GAC AAT CCT TGG CCC AAT AAC |
| HFA14317 | ATG GCA TCC CCA GTA GTC A | GTG ACT TTG ATG ATC TGG ATT C |
| HFA19417 | GCC GAC GAA CAG CCA AA | TCG CAC ACC TCG GGA C |
| HFA14478 | TAA CGG TGA CGG AAC CCA | CCG AAT CCT CGA TGG GTT |
| HFA20970 | GCC AAA ATC AAG CGA ATC AG | CTT AAT TGC CTG CAC CTC C |
| HFA19459 | ATC GGC TGC GTG AGA AC | TTC GTT GGC CAA ACT TTA CA |
| HFA01920 | GAT TGG ACG CTT CGC TTT GA | GTT GAA ACA TTG CTG GGT GA |
| HFA10017 | TGG CTG CCA TGC AGA AG | CCA ATT TCG GCA CGG TAG |
| HFA04144 | AGT GGC AGC GGA GGT G | GCC CTC GCA GTG GGT T |
| HEA14742 | AAA ATA AAT GGA GTA ACT TCC CC | TAC GCC TCG CAC TCC A |
| HFA17927 | CGC AAT GTG GAG GTG AAG | ATC GAA ATA CGA GCC GAT C |
| HFA17993 | TTC GAG GGC CCA CAA TGT | TGG CAA GTC GCA ACT TTA C |
| HFA00432 | CAA AGG CAC CTG GTT TGT G | CAG TAG CGC AGA CGT TG |
| HFA00449 | GGT ATT ACT CTG TTC CGA TTG | CTT CCA GGT TTT TGT GTA TGT C |
| HEA15093 | GGC AAA GAT CCC AAG CAG | GTT GAA GGT GCA GCA GAA G |
| HFA06577 | CAG CCA TCG ATT GGA ACA G | CTC CAA GTG CCA GAA CAT AAA |
| HFA18090 | GGC CAC AAG CAT GGT CG | CCT TGC CCT TGC ACT TCT |
| HFA18561 | TCG CCC ATG GTG CTA GA | CGA TCC ACG GTG ATT ACA G |
| HFA02552 | CAG ACT CCT ACC TCG TTT TG | AAC ATG CGC TCC AGA TAG T |
| HFA10258 | GCC AAG AGA CGG AGA AGA | TAC GGA TGC TGG TTG ATG T |
| HFA02623 | CCC AGG GCC ATT TGG ATT T | TCC TTT AAG CGC TGC ATG |
| HFA15304 | GGG CAT GCC GTC ATT ACA | CGG CGA TAT TTG CTG GTC |
| HFA21006 | GTG GCG CAC CGG AAA G | GAT GAA CTT CAT TGT TGT TGA AA |
| HFA06272 | TGA CGA AGC ATA TAC AAG GAT A | TGG GTT TTT CTG GTG AAA CAA |
| HFA06935 | GTT TGC ATC GGC CAA ACC | GTG TCA GAG AAA TTC ACT AAG TA |
| HFA00563 | AAT ACG TTT CGG TCA CGA TT | GTA TCT GTA CTT GGT AGA GTA GT |
| HFA15507 | CCC CGA GCT GAA TCC CA | CTT CAT GCG GTT GAT GAC TA |
| HFA15369 | CGT AAG TGC TAG TTC CTC TG | TGC CGA GCG TCC CTT T |
| HFA16032 | CCC ACG GAG CTG TTC TTT | AAA CGA CTA CCC AGG ACA TT |
| HFA15235 | AGG CAT CTG CAG ATT CTC T | GAG GAA TGG GAA TGG ATG AAG |
| HFA00415 | GTC ATG GGT CCC GGG ATG | TCG CTT GTC ACG ATT CTT T |
| HFA09966 | CCG CCA CAA TGA TAA CCA AC | CGC GTG CGT GAA GAG T |
| HFA19906 | ATC TGT TGA ACG CCG AGG | GGT ATC GGT GAA GTT CTT CTC |
| HFA15470 | TTG TCG CGA CCT TCC CA | ACT TCT TGG AGC AGA TCT TG |
| HFA10378 | CGG ACA CCG GCT ATG TG | ATG TTC TTG GCC GAG TCA A |
| HFA10395 | TAC TCA AGG ATC GCG ATA TC | GGC TGG GTG TGG GAG TG |
| HFA20930 | GCA GGA CGT TCG GAA TAT C | TCC CAT TAC AGA CTT TTG ATT G |
| HEA19892 | GGC GGC ACA TGT GCA TG | GCC GCT GCC CAT ATA CTT |
| HFA10420 | TGT GGC TGT CGC TTA TCT T | AAA AAT ATA CAG CCG TTT CCT T |
| HEA19909 | ACC CAG CTA AAT CCT ACA ATG | ACT CCA GAT GCT GGG TCA |
| HFA04488 | TTG ACG GAT TGC CAC ATC T | GCC TCC GCG TCC AAG T |
| HFA15673 | TGG GCT CGG CAG AGA TA | CAA GTA GAG GAG CCC GAT |
| HFA16036 | TCT TTG TCA TCA AAT CGT ACT C | CAT CGG GCC CAT GCA TT |
| HFA10635 | TTG AAC ATC GTG GCT TCT TT | CCT CGC AAA CTC GAT GC |
| HFA16145 | CAA CAA CAT GCT GGG CTT C | CGA AGT TCG AGC CGA CA |
| HFA20054 | GAG CGG GCG ATC ATC TT | CTC GGC GGC GAT CAC |
| HFA09675 | GAT GAG AAG GAC GAG AAG AG | CTT GAT GCG GCA ATG GAC |
| HFA20148 | ATA GGT TCA ACA CGA TCC CC | GAA GGC TGG TGT TAG TTT TG |
| HFA11946 | ACT TGC GTG GAG GAA CTA A | ATG CGT AGA GTT CTT CGG T |
| HFA20230 | AGC TCG AGG ACA ATC CAC | GGC TGA CTT TCA CAG TAG AC |
| HFA09995 | CGT ACG ATG ATG CAC TGG | GAA CGG GCA GAA TGG TTG |
| HFA16617 | GGC AGT GGG AGC TCT GA | CTC GGG TCC GGT GAA CT |
| HFA19583 | CGT CTG CGC AGT GAT CC | TGG GCT CCG ATG GAT AGA |
| HFA08714 | AGC GAC GAG GAA GAT GTG | TGA CAA ATG TGG CCT CTG G |
| HFA20983 | TTG GAA AAT CGA GAG GAT TTA A | CAC ATT TTT CGA ATT CAA TTG TC |
| HFA04096 | CGT CTA ATG AGG CAA AGA AAC | CCG TTT TTG CCA CTT TAA CC |
| HFA01091 | TCG TGA TGG TGT TGG TGA C | TCC ACT GAA AGT GCT TTG GT |
| HFA11427 | GGG CGA ATG CAC GGA AT | TGG CAT ACC TCG AAT AAC TG |
| HFA20340 | TAA TCG A CG ATC AGG A AC AG | GTG TGG CCT CGG AGG TG |
| HFA00357 | CGT CCC CCG GTT TTA CG | ATC AGC CAG TCT TGA ATA GTC |
| HFA04167 | ATA AAA GGC GCC AAG GTG A | TCA CCT GCA TTC CCG TTT C |
| HFA07637 | GAC GGG CTT CAA TTC CTA TG | GCG ACG AGG AGA GTG TG |
| HFA19450 | TGC TGC GCA AGC GAC | CAT TTG CGT GGA AGA TGA CA |
| HFA16984 | CAC AAA GCC GCT GAA CAG | TTC GTG GTT ACA CAC ACA GT |
| HFA07247 | CCG CGC GAA CGA CTT | TGA TCG CTT ATC ATC GTA TAT TA |
| HFA15370 | ACT AGT AGC AGT CAG TCC TC | GCG CCA GCG TTG CTA T |
| HFA20582 | ACA GCA TTC GGG TGG TAA A | GCC ATC CGA AGT TGA TCG |
| HFA20357 | AAC CAG AAC CAG AAT CAA AAT G | GTT TCC AGC GCG ATT ATT G |
| HFA03384 | GGC TGG ATG GAG TTG TTT G | GGA CTT ATG GGC TGA TTG AAC |
| HFA15220 | AGC GGG TGC AGG AGT TC | TTC TTA TTA CTG GCC ACA TCA T |
| HFA07660 | CAC GTT CTG CGG TAG CC | GCT TGG GAT CGG CTA AAT C |
| HFA16795 | TTG TGG GTA AAT TTT TAC AGA AG | CGA ATT CCC CGC AGT AGT |
| HFA16344 | CGG ATC CGG AGC ACC C | GCG ATG GAG CTG CTG G |
| HFA08683 | CTT GAC GCT GAA GAA CCC | CCT GGA ATT GGA TCG ATG C |
| HFA00777 | GGC AAC CAC TCC ACG CA | TCC TGG CCA GCC GTG T |
| HFA00784 | AGA GCC GCC GAA ACA AC | GGC TTG GTT TCA GTA GAG G |
| HFA02455 | CAG CAG TAA AGC ACT TTC AA | CCG ATT CCG GCA TGG C |
| HFA20587 | GAG TAC AAG CAT GTG TAC AAG | GTT CCT GGT GGA GGT AGT G |
| HFA16870 | CTT GCC CAA AAC TAC AGT TAC | CGA CTG TGG GTG GAT TGT T |
| HEA11298 | AAG GAA AGC GCA TTT CGT | AAA TCC ATA TCC ACT TCC TCA C |
| HFA11098 | ATC CCT CAA ATC CCA GTT CC | AAA GTG GCG CTG TGG TG |

| | No of | Target | Cyto- | |
|---|---|---|---|---|
| | efficient | gene | logical | |
| dsRNA ID | siRNAsB | (Symbol) | location | SEQ ID NOs. |
| HFA00627 | 51/496 | Art2 | 24E1 | SEQ ID NOs. |
| | | | | 266/267 |
| HFA11324 | 61/489 | asf1 | 76B9 | SEQ ID NOs. |
| | | | | 268/269 |
| HFA04919 | 87/487 | bin3 | 42A13--14 | SEQ ID NOs. |
| | | | | 270/271 |
| HFA16914 | 60/496 | bon | 92F2--3 | SEQ ID NOs. |
| | | | | 272/273 |
| HFA16596 | 81/496 | Caf1 | 88E3 | SEQ ID NOs. |
| | | | | 274/275 |
| HFA14173 | 139/494 | CG10007 | 87A4 | SEQ ID NOs. |
| | | | | 276/277 |
| HFA09691 | 72/484 | CG10077 | 65D3--4 | SEQ ID NOs. |
| | | | | 278/279 |
| HFA02102 | 103/497 | CG10730 | 38B2 | SEQ ID NOs. |
| | | | | 280/281 |
| HFA09807 | 63/495 | CG10960 | 69E5--6 | SEQ ID NOs. |
| | | | | 282/283 |
| HFA11648 | 51/242 | CG11307 | 78E1 | SEQ ID NOs. |
| | | | | 284/285 |
| HFA06070 | 85/459 | CG11400 | 54A1 | SEQ ID NOs. |
| | | | | 286/287 |
| HFA14317 | 28/312 | CG11501 | 99B1 | SEQ ID NOs. |
| | | | | 288/289 |
| HFA19417 | 64/486 | CG11696 | 10C7 | SEQ ID NOs. |
| | | | | 290/291 |
| HFA14478 | 78/498 | CG12213 | 87A3 | SEQ ID NOs. |
| | | | | 292/293 |
| HFA20970 | 50/114 | CG12460* | hetero- | SEQ ID NOs. |
| | | | chromatin | 294/295 |
| HFA19459 | 19/181 | CG12479 | 12E2 | SEQ ID NOs. |
| | | | | 296/297 |
| HFA01920 | 112/494 | CG13243 | 35D4--5 | SEQ ID NOs. |
| | | | | 298/299 |
| HFA10017 | 73/391 | CG13473 | 70F3 | SEQ ID NOs. |
| | | | | 300/301 |
| HFA04144 | 19/256 | CG13499 | 58B1 | SEQ ID NOs. |
| | | | | 302/303 |
| HEA14742 | 34/497 | CG14247 | 97D1 | SEQ ID NOs. |
| | | | | 304/305 |
| HFA17927 | 52/490 | CG14434 | 6D7 | SEQ ID NOs. |
| | | | | 306/307 |
| HFA17993 | 122/475 | CG15306 | 9B7 | SEQ ID NOs. |
| | | | | 308/309 |
| HFA00432 | 19/143 | CG15418 | 24A2 | SEQ ID NOs. |
| | | | | 310/311 |
| HFA00449 | 30/217 | CG15434 | 24F3 | SEQ ID NOs. |
| | | | | 312/313 |
| HEA15093 | 58/283 | CG15555 | 100B9 | SEQ ID NOs. |
| | | | | 314/315 |
| HFA06577 | 77/477 | CG15706 | 52F11 | SEQ ID NOs. |
| | | | | 316/317 |
| HFA18090 | 51/500 | CG15784 | 4F10 | SEQ ID NOs. |
| | | | | 318/319 |
| HFA18561 | 72/477 | CG16903 | 2C10 | SEQ ID NOs. |
| | | | | 320/321 |
| HFA02552 | 54/495 | CG16975 | 34A7--8 | SEQ ID NOs. |
| | | | | 322/323 |
| HFA10258 | 3/155 | CG17179* | U | SEQ ID NOs. |
| | | | | 324/325 |
| HFA02623 | 71/486 | CG17492 | 37B10--11 | SEQ ID NOs. |
| | | | | 326/327 |
| HFA15304 | 78/475 | CG18112 | 99C2 | SEQ ID NOs. |
| | | | | 328/329 |
| HFA21006 | 50/114 | CG18160* | U | SEQ ID NOs. |
| | | | | 330/331 |
| HFA06272 | 111/489 | CG30069 | 50E2--3 | SEQ ID NOs. |
| | | | | 332/333 |
| HFA06935 | 62/463 | CG30122 | 55E3 | SEQ ID NOs. |
| | | | | 334/335 |
| HFA00563 | 69/326 | CG3058 | 24F1 | SEQ ID NOs. |
| | | | | 336/337 |
| HFA15507 | 8/197 | CG31005 | 100B8 | SEQ ID NOs. |
| | | | | 338/339 |
| HFA15369 | 34/488 | CG31132 | 95F12--13 | SEQ ID NOs. |
| | | | | 340/341 |
| A16032 | 63/495 | CG31132 | 95F12--13 | SEQ ID NOs. |
| | | | | 342/343 |
| HFA15235 | 112/488 | CG31358 | 87A5 | SEQ ID NOs. |
| | | | | 344/345 |
| HFA00415 | 28/159 | CG31694 | 23B7--8 | SEQ ID NOs. |
| | | | | 346/347 |
| HFA09966 | 68/477 | CG32406 | 65A2--3 | SEQ iD NOs. |
| | | | | 348/349 |
| HFA19906 | 39/495 | CG32573 | 14F5 | SEQ ID NOs. |
| | | | | 350/351 |
| HFA15470 | 66/500 | CG3281 | 87A3 | SEQ ID NOs. |
| | | | | 352/353 |
| HFA10378 | 70/482 | CG3819 | 75E6 | SEQ ID NOs. |
| | | | | 354/355 |
| HFA10395 | 53/484 | CG4022 | 6B84--5 | SEQ ID NOs. |
| | | | | 356/357 |
| HFA20930 | 199/540 | CG40351 | U | SEQ ID NOs. |
| | | | | 358/359 |
| HEA19892 | 97/480 | CG4349 | 11D11 | SEQ ID NOs. |
| | | | | 360/361 |
| HFA10420 | 56/481 | CG4446 | 67B2 | SEQ ID NOs. |
| | | | | 362/363 |
| HEA19909 | 55/496 | CG4653 | 15A3 | SEQ ID NOs. |
| | | | | 364/365 |
| HFA04488 | 75/482 | CG4781 | 60D10 | SEQ ID NOs. |
| | | | | 366/367 |
| HFA15673 | 105/492 | CG4907 | 94C2 | SEQ ID NOs. |
| | | | | 368/369 |
| HFA16036 | 102/487 | CG6422 | 96B17 | SEQ ID NOs. |
| | | | | 370/371 |
| HFA10635 | 39/148 | CG6434 | 77B4 | SEQ ID NOs. |
| | | | | 372/373 |
| HFA16145 | 118/468 | CG6946 | 86F8--9 | SEQ ID NOs. |
| | | | | 374/375 |
| HFA20054 | 33/452 | CG7635 | 18A6 | SEQ ID NOs. |
| | | | | 376/377 |
| HFA09675 | 56/481 | CG8108 | 67C11--D1 | SEQ ID NOs. |
| | | | | 378/379 |
| HFA20148 | 93/492 | CG9086 | 15C5--6 | SEQ ID NOs. |
| | | | | 380/381 |
| HFA11946 | 144/490 | Ckllalpha | 80D1 | SEQ ID NOs. |
| | | | | 382/383 |
| HFA20230 | 27/152 | Ckllbeta | 10E3 | SEQ ID NOs. |
| | | | | 384/385 |
| HFA09995 | 37/499 | comm3 | 71E3--4 | SEQ ID NOs. |
| | | | | 386/387 |
| HFA16617 | 30/254 | CtBP | 87D8--9 | SEQ ID NOs. |
| | | | | 388/389 |
| HFA19583 | 39/480 | dome | 18D13--E1 | SEQ ID NOs. |
| | | | | 390/391 |
| HFA08714 | 65/476 | dre4 | 62B7 | SEQ ID NOs. |
| | | | | 392/393 |
| HFA20983 | 159/488 | elF-4B | U | SEQ ID NOs. |
| | | | | 394/395 |
| HFA04096 | 84/487 | enok | 60B10 | SEQ ID NOs. |
| | | | | 396/397 |
| HFA01091 | 48/220 | HDCC1676 | 30D1 | SEQ ID NOs. |
| | | | | 398/399 |
| HFA11427 | 105/477 | HDC11198 | 77D4 | SEQ ID NOs. |
| | | | | 400/401 |
| HFA20340 | 52/493 | hop | 10B5--6 | SEQ ID NOs. |
| | | | | 402/403 |
| HFA00357 | 75/488 | lpk2 | 21E2 | SEQ ID NOs. |
| | | | | 404/405 |
| HFA04167 | 18/202 | jbug | 59A3 | SEQ ID NOs. |
| | | | | 406/407 |
| HFA07637 | 10/228 | kn | 51C2--3 | SEQ ID NOs. |
| | | | | 408/409 |
| HFA19450 | 38/496 | l(1)G0084 | 18D8--11 | SEQ ID NOs. |
| | | | | 410/411 |
| HFA16984 | 88/496 | larp | 98C3--4 | SEQ ID NOs. |
| | | | | 412/413 |
| HFA07247 | 35/377 | lig | 44A4 | SEQ ID NOs. |
| | | | | 414/415 |
| HFA15370 | 30/486 | mask | 95F3--5 | SEQ ID NOs. |
| | | | | 416/417 |
| HFA20582 | 58/473 | mst | 20A1 | SEQ ID NOs. |
| | | | | 418/419 |
| HFA20357 | 27/118 | nonA | 14B18--C1 | SEQ ID NOs. |
| | | | | 420/421 |
| HFA03384 | 87/500 | Nup154 | 32C5 | SEQ ID NOs. |
| | | | | 422/423 |
| HFA15220 | 36/167 | Obp93a | 93C1 | SEQ ID NOs. |
| | | | | 424/425 |
| HFA07660 | 60/324 | par-1 | 56D9--11 | SEQ ID NOs. |
| | | | | 426/427 |
| HFA16795 | 12/118 | Pp1alpha-96A | 96A5 | SEQ ID NOs. |
| | | | | 428/429 |
| HFA16344 | 32/469 | PP2A-B′ | 90E4--5 | SEQ ID NOs. |
| | | | | 430/431 |
| HFA08683 | 72/495 | Ptp61F | 61F7--62A1 | SEQ ID NOs. |
| | | | | 432/433 |
| HFA00777 | 28/244 | Rab5 | 22E1 | SEQ ID NOS. |
| | | | | 434/435 |
| HFA00784 | 98/487 | Rrp1 | 23C3--4 | SEQ ID NOs. |
| | | | | 436/437 |
| HFA02455 | 38/490 | Socs36E | 36E6 | SEQ ID NOs. |
| | | | | 438/439 |
| HFA20587 | 31/359 | sol | 19F5 | SEQ ID NOs. |
| | | | | 440/441 |
| HFA16870 | 64/479 | Stat92E | 92F1 | SEQ ID NOs. |
| | | | | 442/443 |
| HEA11298 | 114/481 | Taf2 | 67D1 | SEQ ID NOs. |
| | | | | 444/445 |
| HFA11098 | 53/319 | TSG101 | 73D1 | SEQ ID NOs. |
| | | | | 446/447 |

A Complete amplicon informaion can be obtained at http://mai.dkfz.de
B Efficiency calculated based on Reynolds et al., (2004). All siRNAs with score of 6 or higher were counted as efficient.
*Annotation according to Release 2 of the Berkeley Drosophila Genome Project

TABLE 5
Human homologues of Drosophila genes with JAK/STAT phenotypes

| | | | | | RefSeq | |
|---|---|---|---|---|---|---|
| Drosophila | | Identity | | | nucleic | |
| Gene | BLASTP | [%] | Human Gene | RefSeq protein | acid | SEQ ID Nos |
| Art2 | 1.60E−77 | 44.2 | protein arginine N-methyltransferase 4 | NP_062828.2 | NM_019854 | SEQ ID NO. 1/88 |
| asf1 | 3.20E−68 | 61.7 | ASF1 anti-silencing function 1 homolog A | NP_054753.1 | NM_014034 | SEQ ID NO. 2/89 |
| bin3 | 8.80E−49 | 34.3 | hypothetical protein FLJ20257 | NP_062552.2 | NM_019606 | SEQ ID NO. 3/90 |
| bon | 3.60E−45 | 30.5 | tripartite motif-containing 33 protein | NP_056990.2 | NM_015906 | SEQ ID NO. 4/91 |
| Caf1 | 0 | 91.9 | retinoblastoma binding protein 4 | NP_005601.1 | NM_005610 | SEQ ID NO. 5/92 |
| CG10007 | 8.80E−50 | 34.5 | chromosome 2 open reading frame 18 | NP_060347.2 | NM_017877 | SEQ ID NO. 6/93 |
| CG10077 | 7.00E−171 | 67.7 | DEAD (Asp-Glu-Ala-Asp) box polypeptide 5 | NP_004387.1 | NM_004396 | SEQ ID NO. 7/94 |
| CG10960 | 3.40E−78 | 36.9 | solute carrier family 2, (facilitated glucose | NP_055395.2 | NM_014580 | SEQ ID NO. 8/95 |
| | | | transporter) member 8 | | | |
| CG11696 | 5.10E−33 | 29.9 | zinc finger protein 502 | NP_149987.2 | NM_033210 | SEQ ID NO. 9/96 |
| CG12460 | 1.80E−17 | 54.0 | splicing factor proline/glutamine rich (polypyrimidine | NP_005057.1 | NM_005066 | SEQ ID NO. 10/97 |
| | | | tract binding protein associated) | | | |
| CG13473 | 3.90E−17 | 34.9 | thioredoxin 2 precursor | NP_036605.2 | NM_012473 | SEQ ID NO. 11/98 |
| CG15306 | 3.30E−27 | 45.1 | microtubule-associated protein, RP/EB family, member 1 | NP_036457.1 | NM_012325 | SEQ ID NO. 12/99 |
| CG15418 | 1.40E−10 | 41.1 | tissue factor pathway inhibitor 2 | NP_006519.1 | NM_006528 | SEQ ID NO. 13/100 |
| CG15434 | 1.60E−17 | 50.6 | NADH dehydrogenase (ubiquinone) | NP_002479.1 | NM_002488 | SEQ ID NO. 14/101 |
| | | | 1 alpha subcomplex, 2, 8 kDa | | | |
| CG15706 | 6.60E−20 | 20.0 | FLJ20160 protein | NP_060164.2 | NM_017694 | SEQ ID NO. 15/102 |
| CG16903 | 2.00E−100 | 63.1 | cyclin L1 | NP_064703.1 | NM_020307 | SEQ ID NO. 16/103 |
| CG16975 | 4.00E−123 | 49.4 | l(3)mbt-like 2 isoform a | NP_113676.2 | NM_031488 | SEQ ID NO. 17/104 |
| CG17492 | 0 | 48.3 | zinc finger, ZZ type with ankyrin repeat domain 1 | NP_543151.1 | NM_080875 | SEQ ID NO. 18/105 |
| CG18112 | 1.80E−20 | 27.8 | chromosome 14 open reading frame 133 | NP_071350.2 | NM_022067 | SEQ ID NO. 19/106 |
| CG30122 | 7.20E−42 | 40.9 | E1B-55 kDa-associated protein 5 isoform a | NP_008971.2 | NM_007040 | SEQ ID NO. 20/107 |
| CG3058 | 2.60E−80 | 95.8 | thioredoxin-like 4 | XP_499552.1 | XM_499552 | SEQ ID NO. 21/108 |
| CG31005 | 9.00E−100 | 52.5 | trans-prenyltransferase | NP_055132.2 | NM_014317 | SEQ ID NO. 22/109 |
| CG31132 | 0 | 49.9 | bromo domain-containing protein disrupted in leukemia | NP_694984.2 | NM_153252 | SEQ ID NO. 23/110 |
| CG31358 | 2.10E−51 | 44.2 | stomatin-like 3 | NP_660329.1 | NM_145286 | SEQ ID NO. 24/111 |
| CG31694 | 2.00E−66 | 36.3 | interferon-related developmental regulator 2 | NP_006755.3 | NM_006764 | SEQ ID NO. 25/112 |
| CG32406 | 5.50E−15 | 37.8 | C1 domain-containing phosphatase | NP_938072.1 | NM_198316 | SEQ ID NO. 26/113 |
| | | | and tensin-like protein isoform 3 | | | |
| CG3281 | 4.00E−41 | 31.7 | zinc finger protein 91 | NP_003421.1 | NM_003430 | SEQ ID NO. 27/114 |
| CG40351 | 2.20E−94 | 56.6 | PREDICTED: KIAA1076 protein | XP_037523.9 | XM_037523 | SEQ ID NO. 28/115 |
| CG4349 | 4.60E−35 | 45.2 | ferritin, heavy polypeptide 1 | NP_002023.2 | NM_002032 | SEQ ID NO. 29/116 |
| CG4446 | 1.90E−66 | 47.2 | pyridoxal kinase | NP_003672.1 | NM_003681 | SEQ ID NO. 30/117 |
| CG4653 | 8.80E−23 | 30.7 | protease, serine, 2 preproprotein | NP_002761.1 | NM_002770 | SEQ ID NO. 31/118 |
| CG4781 | 2.00E−17 | 33.8 | PREDICTED: similar to KIAA0644 protein | XP_379800.1 | XM_379800 | SEQ ID NO. 32/119 |
| CG4907 | 1.10E−47 | 28.9 | phosphatidylinositol glycan, class N | NP_036459.1 | NM_012327 | SEQ ID NO. 33/120 |
| CG6422 | 1.30E−71 | 53.8 | YTH domain family, member 1 | NP_060268.2 | NM_017798 | SEQ ID NO. 34/121 |
| CG6434 | 6.20E−69 | 71.2 | retinoblastoma binding protein 5 | NP_005048.2 | NM_005057 | SEQ ID NO. 35/122 |
| CG6946 | 4.00E−39 | 46.2 | heterogeneous nuclear ribonucleoprotein F | NP_004957 | NM_004966 | SEQ ID NO. 36/123 |
| CG7635 | 2.90E−76 | 62.1 | stomatin isoform a | NP_004090.4 | NM_004099 | SEQ ID NO. 37/124 |
| CG9086 | 0 | 32.0 | ubiquitin protein ligase E3 component n-recognin 1 | NP_777576.1 | NM_174916 | SEQ ID NO. 38/125 |
| CkIIalpha | 4.00E−163 | 88.7 | casein kinase II alpha 1 subunit isoform a | NP_001886.1 | NM_001895 | SEQ ID NO. 39/126 |
| CkIIbeta | 5.00E−107 | 89.2 | casein kinase 2, beta polypeptide | NP_001311.3 | NM_001320 | SEQ ID NO. 40/127 |
| CtBP | 8.00E−152 | 72.4 | C-terminal binding protein 2 isoform 1 | NP_001320.1 | NM_001329 | SEQ ID NO. 41/128 |
| dome | 7.60E−15 | 28.2 | sidekick 2 | NP_061937.2 | NM_019064 | SEQ ID NO. 42/129 |
| dre4 | 0 | 59.9 | chromatin-specific transcription elongation | NP_009123.1 | NM_007192 | SEQ ID NO. 43/130 |
| | | | factor large subunit | | | |
| eIF-4B | 4.70E−32 | 27.2 | eukaryotic translation initiation factor 4B | NP_001408.1 | NM_001417 | SEQ ID NO. 44/131 |
| enok | 1.80E−94 | 33.4 | MYST histone acetyltransferase (monocytic leukemia) 3 | NP_006757.1 | NM_006766 | SEQ ID NO. 45/132 |
| HDC01676 | 2.80E−15 | 61.0 | cholinergic receptor, nicotinic, alpha polypeptide | NP_000737.1 | NM_000746 | SEQ ID NO. 46/133 |
| | | | 7 precursor | | | |
| hop | 1.60E−59 | 26.7 | Janus kinase 2 | NP_004963.1 | NM_004972 | SEQ ID NO. 47/134 |
| Ipk2 | 1.80E−26 | 33.6 | inositol polyphosphate multikinase | NP_689416.1 | NM_152230 | SEQ ID NO. 48/135 |
| jbug | 5.30E−45 | 27.6 | filamin B, beta (actin binding protein 278) | NP_001448.1 | NM_001457 | SEQ ID NO. 49/136 |
| kn | 0 | 69.7 | early B-cell factor | NP_076870.1 | NM_024007 | SEQ ID NO. 50/137 |
| l(1)G0084 | 7.40E−28 | 31.5 | PHD finger protein 10 isoform a | NP_060758.1 | NM_018288 | SEQ ID NO. 51/138 |
| larp | 2.00E−103 | 48.1 | KIAA0731 protein | NP_056130.2 | NM_015315 | SEQ ID NO. 52/139 |
| lig | 5.50E−25 | 32.8 | ubiquitin associated protein 2 isoform 2 | NP_065918.1 | NM_020867 | SEQ ID NO. 53/140 |
| mask | 0 | 74.0 | multiple ankyrin repeats, single KH-domain | NP_060217.1 | NM_017747 | SEQ ID NO. 54/141 |
| | | | protein isoform 1 | | | |
| mst | 7.00E−52 | 29.7 | misato | NP_060586.2 | NM_018116 | SEQ ID NO. 55/142 |
| nonA | 1.80E−60 | 40.6 | splicing factor proline/glutamine rich | NP_005057.1 | NM_005066 | SEQ ID NO. 56/143 |
| | | | (polypyrimidine tract binding protein associated) | | | |
| Nup154 | 0 | 32.6 | nucleoporin 155 kDa isoform 1 | NP_705618.1 | NM_153485 | SEQ ID NO. 57/144 |
| par-1 | 0 | 54.1 | MAP/microtubule affinity-regulating kinase 3 | NP_002367.4 | NM_002376 | SEQ ID NO. 58/145 |
| Pp1alpha-96A | 8.00E−169 | 88.9 | protein phosphatase 1, catalytic subunit, alpha isoform 1 | NP_002699.1 | NM_002708 | SEQ ID NO. 59/146 |
| PP2A-B′ | 0 | 78.9 | delta isoform of regulatory subunit B56, | NP_006236.1 | NM_006245 | SEQ ID NO. 60/147 |
| | | | protein phosphatase 2A isoform 1 | | | |
| Ptp61F | 5.00E−32 | 37.9 | hypothetical protein LOC9671 | NP_055468 | NM_014653 | SEQ ID NO. 61/148 |
| Rab5 | 4.90E−85 | 75.0 | RAB5A, member RAS oncogene family | NP_004153.2 | NM_004162 | SEQ ID NO. 62/149 |
| Rrp1 | 6.10E−82 | 55.2 | APEX nuclease | NP_542380.1 | NM_080649 | SEQ ID NO. 63/150 |
| Socs36E | 4.80E−65 | 68.0 | suppressor of cytokine signaling 5 | NP_054730.1 | NM_014011 | SEQ ID NO. 64/151 |
| Stat92E | 6.40E−86 | 41.6 | signal transducer and activator of transcription 5B | NP_036580.2 | NM_012448 | SEQ ID NO. 65/152 |
| Taf2 | 0 | 52.5 | TBP-associated factor 2 | NP_003175.1 | NM_003184 | SEQ ID NO. 66/153 |
| TSG101 | 4.30E−98 | 48.7 | tumor susceptibility gene 101 | NP_006283.1 | NM_006292 | SEQ ID NO. 67/154 |

Shown are human homologues of Drosophila genes with a BLASTP E value of 10⁻¹⁰ or less.

TABLE 6
Human disease homologues of Drosophila genes with JAK/STAT phenotypes

| Drosophila | | | |
|---|---|---|---|
| Gene | BLASTP | Human Gene | RefSeq protein |
| bon | 3.60E−45 | tripartite motif- | NP_056990.2 |
| | | containing 33 protein | |
| Caf1 | 9.90E−17 | peroxin 7 | NP_000279 |
| CG10960 | 1.40E−39 | erythrocyte/hepatoma | NP_006507 |
| | | glucose transporter | |
| CG11696 | 2.60E−25 | zinc finger protein 41 | NP_006051 |
| CG17492 | 4.80E−23 | ankyrin, brain | NP_001139 |
| CG31132 | 2.70E−17 | Lissencephaly-1 Gene | NP_000421 |
| CG31132 | 0 | bromo domain-containing protein disrupted in leukemia | NP_694984 |
| CG31358 | 7.40E−38 | Podocin | NP_055440 |
| CG32573 | 7.80E−47 | Protein Kinase C, alpha | NP_002728 |
| CG3281 | 2.00E−33 | zinc finger protein 41 | NP_009061 |
| CG40351 | 2.10E−14 | Androgen Receptor-Associated Coregulator 267 | NP_071900 |
| CG4349 | 4.60E−35 | ferritin, heavy polypeptide 1 | NP_002023.2 |
| CG4349 | 3.50E−35 | fth | NP_002023 |
| CG4653 | 6.90E−22 | Protease, Serine, 1 | NP_002760 |
| CG7635 | 2.90E−76 | stomatin isoform a | NP_004090.4 |
| CG7635 | 5.70E−62 | Podocin | NP_055440 |
| CkIIalpha | 1.20E−23 | serine/threonine protein kinase 9 | NP_003150 |
| CtBP | 4.20E−24 | 3-phosphogylcerate dehydrogenase; 3pgdh | NP_006614 |
| dre4 | 4.60E−46 | Lipase A precursor | NP_000226 |
| HDC01676 | 2.80E−15 | cholinergic receptor, nicotinic, alpha polypeptide 7 precursor | NP_000737.1 |
| hop | 8.40E−52 | Janus kinase 3 | NP_000206 |
| jbug | 5.30E−45 | filamin B, beta (actin binding protein 278) | NP_001448.1 |
| jbug | 5.30E−45 | filamin B, beta (actin binding protein 278) | NP_001448.1 |
| jbug | 5.30E−45 | filamin B, beta (actin binding protein 278) | NP_001448.1 |
| jbug | 6.00E−102 | actin-binding protein 280; abp280 | NP_001447 |
| mask | 5.30E−59 | ankyrin, brain | NP_001139 |
| par-1 | 5.30E−39 | Oncogene Akt2 | NP_001617 |
| Ptp61F | 7.80E−79 | Protein phosphotyrosylphosphatase 1B | NP_002818 |
| Rab5 | 8.90E−23 | ras-associatad protein RAB27A | NP_004571 |
| sol | 2.80E−33 | calcium-activated neutral protease 3 | NP_000061 |
| Stat92E | 6.40E−86 | signal transducer and activator of transcription 5B | NP_036580.2 |
| Stat92E | 6.40E−86 | signal transducer and activator of transcription 5B | NP_036580.2 |
| TSG101 | 4.30E−98 | tumor susceptibility gene 101 | NP_006283.1 |

| | RefSeq | | |
|---|---|---|---|
| Drosophila | Nucleic | | |
| Gene | acid | Disease | SEQ ID Nos |
| bon | NM_015906 | Thyroid carcinoma, papillary(2) | SEQ ID NO. 4/91 |
| Caf1 | NM_000288 | Refsum disease (1) | SEQ ID NO. 68/155 |
| CG10960 | NM_006516 | Glucose transport defect, blood-brain barrier (1) | SEQ ID NO. 69/156 |
| CG11696 | NM_006060 | Mental Retardation, X-linked nonsyndromic (1) | SEQ ID NO. 70/157 |
| CG17492 | NM_001148 | Long QT syndrome 4 (1) | SEQ ID NO. 71/158 |
| CG31132 | NM_000430 | Subcortical laminar heterotopia (1) | SEQ ID NO. 72/159 |
| CG31132 | NM_153252 | Leukemia (3) | SEQ ID NO. 73/160 |
| CG31358 | NM_014625 | Nephrotic syndrome, steroid-resistant (1) | SEQ ID NO. 74/161 |
| CG32573 | NM_002737 | Pituitary Tumor, invasive (1) | SEQ ID NO. 75/162 |
| CG3281 | NM_007130 | Mental Retardation, X-linked nonsyndromic (1) | SEQ ID NO. 76/163 |
| CG40351 | NM_022455 | Sotos Syndrome, sporadic (1) | SEQ ID NO. 77/164 |
| CG4349 | NM_002032 | Iron overload, autosomal dominant (2) | SEQ ID NO. 29/116 |
| CG4349 | NM_002032 | Iron overload, autosomal dominant (1) | SEQ ID NO. 29/116 |
| CG4653 | NM_002769 | Pancreatitis, hereditary (1) | SEQ ID NO. 78/165 |
| CG7635 | NM_004099 | Stomatocytosis I (2) | SEQ ID NO. 37/124 |
| CG7635 | NM_014625 | Nephrotic syndrome, steroid-resistant (1) | SEQ ID NO. 74/161 |
| CkIIalpha | NM_003159 | Rett Syndrome, atypical (1) | SEQ ID NO. 79/166 |
| CtBP | NM_006623 | Phosphoglycerate dehydrogenase deficiency (1) | SEQ ID NO. 80/167 |
| dre4 | NM_000235 | Wolman disease (1) | SEQ ID NO. 81/168 |
| HDC01676 | NM_000746 | Schizophrenia, neurophysiologic defect in (2) | SEQ ID NO. 46/133 |
| hop | NM_000215 | SCID, autosomal recessive, T-negative/B- | SEQ ID NO. 82/169 |
| | | positive type (1) | |
| jbug | NM_001457 | Atelostogenesis, type I (2) | SEQ ID NO. 49/136 |
| jbug | NM_001457 | Larson syndrome (2) | SEQ ID NO. 49/136 |
| jbug | NM_001457 | Spondylocarpotarsal synostosis syndrome (2) | SEQ ID NO. 49/136 |
| jbug | NM_001456 | Frontometaphyseal dysplasia (1) | SEQ ID NO. 83/170 |
| mask | NM_001148 | Long QT syndrome 4 (1) | SEQ ID NO. 71/158 |
| par-1 | NM_001626 | Diabetes mellitus, type II (1) | SEQ ID NO. 84/171 |
| Ptp61F | NM_002827 | Insulin resistance, susceptibility to (1) | SEQ ID NO. 85/172 |
| Rab5 | NM_004580 | Griscelli Syndrome (1) | SEQ ID NO. 86/173 |
| sol | NM_000070 | Muscular dystrophy, limb-girdle, type 2A (1) | SEQ ID NO. 87/174 |
| Stat92E | NM_012448 | Leukemia, acute promyetoyctic, | SEQ ID NO. 65/152 |
| | | STAT5B/RARA type (2) | |
| Stat92E | NM_012448 | Growth hormone insensitivity with | SEQ ID NO. 65/152 |
| | | immunodeficiency (2) | |
| TSG101 | NM_006292 | Breast cancer (2) | SEQ ID NO. 67/154 |

Shown are the relevant diseases of the human homologues with a BLASTP E value of 10⁻¹⁰ or less as referenced in Homophila (Chien et al., 2002) and OMIM.
(1) data sets were downloaded from Homophila Version 2.1 (update 13 Apr 2005). Chien, S., Reiter, L. T., Bier, E. and Griboskov M., Nucleic Acids Research 30: 149-151 (2002)
(2) data sets from: Online Mendelian Inheritance in Man, OMIM (TM). McKusick-Nathans Institute for Genetic Medicine, Johns Hopkins University (Baltimore, MD) and National Center for Biotechnology Information, National Library of Medicine (Bethesda, MD), 2000. World Wide Web URL: http://www.ncbi.nlm.nih.gov/omim/
(3) information from: Kalla, C., Nentwich, H., Schlotter, M., Mertens, D., Wildenberger, K., Dohner, H., Stilgenbauer, S. and Lichter, P., Genes Chromosomes Cancer 42 (2): 128-143 (2005)

SUPPLEMENTARY TABLE 7
Expected and Observed Phenotype Frequency

| | | | Expected | | Observed | |
|---|---|---|---|---|---|---|
| | | | Phenotypes | | Phenotypes | |
| Chromosome | No Genes* | % | Pos | Neg | Pos | Neg |
| X | 2292 | 17% | 11 | 4 | 16 | 0 |
| 2L | 2444 | 18% | 11 | 4 | 10 | 5 |
| 2R | 2687 | 20% | 12 | 5 | 5 | 7 |
| 3L | 2612 | 19% | 12 | 4 | 15 | 4 |
| 3R | 3392 | 25% | 16 | 6 | 15 | 8 |
| 4 | 82 | 1% | 1 | 0 | 0 | 0 |
| Unmapped | | | | | 5 | 0 |

*Location according to Release 3.1 of the Berkeley Drosophila Genome Project

TABLE 7

| | Gene Name: | Gene Name: Homo | Accession | | SEQ ID |
|---|---|---|---|---|---|
| Ranking | D. melanogaster | sapiens | Number | Associated Disease | NOs: |
| 1 | HDC01676 | CHRNA7 | NM_000746 | Schizophrenia, neurophysiologic defect | 46/133 |
| 2 | CG4349 | FTH1 | NM 002032 | Iron overload, autosomal dominant | 29/116 |
| 3 | TSG101 | TSG101 | NM_006292 | Breast cancer | 67/154 |
| 4 | bon | TRIM33 | NM_015906 | Thyroid carcinoma, papillary | 4/_9 |
| 5 | mask | MLL3 | NM_021230 | Myeloid leukemia | 83/170 |
| 6 | enok | MYST3 | NM_006766 | Acute myeloid leukemia | 45/132 |
| 7 | Caf1 | RBBP4 | NM_005610 | Refsum disease | 68/155 |
| 8 | Rab5 | RAB5A | NM_004162 | | 86/173 |
| 9 | CG31694 | IFRD2 | NM_006764 | Small cell lung cancer | 25/112 |
| 10 | sol | CAPN3 | NM_000070 | Muscular dystrophy, limb-girdle, type 2A | 87/174 |
| 11 | CG31132 | BRODL | NM_153252 | Leukemia | 72/159 |
| 12 | CG15434 | NDUFA2 | NM_002488 | Muscular dystrophy, limb-girdle, 1A | 14/101 |
| 13 | CG3819 | ENDOGL1 | NM_005107 | Carcinomas of lung, uterus, esophagus, kidney | 207 |
| 14 | CG31005 | TPRT | NM_014317 | | 22/109 |
| 15 | Pp1alpha-96A | PPP1CC | NM_002710 | | 59/146 |
| 16 | CG10077 | DDX5 | NM_004396 | | 7/_94 |
| 17 | CG17492 | LOC142678 | NM_080875 | | 71/158 |
| 18 | kn | DKFZP667B0210 | NM_024007 | | 50/137 |
| 19 | CG31132 | C21ORF107 | NM_018963 | | 72/159 |
| 20 | Pp1alpha-96A | PPP1CA | NM_002708 | | 59/146 |
| 21 | CtBP | CTBP2 | NM_001329 | | 80/167 |
| 22 | PP2A-B′ | PPP2R5D | NM_006245 | | 60/147 |
| 23 | Nup154 | NUP155 | NM_004298 | | 57/144 |
| 24 | mask | ANKHD1 | NM_017747 | | 83/170 |
| 25 | Art2 | HRMT1L4 | NM_019854 | | 1/_88 |
| 26 | CG18112 | C14ORF133 | NM_022067 | | 19/106 |
| 27 | I(1)G0084 | PHF10 | NM_018288 | | 51/138 |

TABLE 8

| | | | z- | STAT3 | STAT1 | |
|---|---|---|---|---|---|---|
| Gene name | | | score | activity | activity | |
| Drosophila | Gene Name | Accession | [Dmel- | [induction | [induction | |
| melanogaster | Homo sapiens | Number | screen] | SOCS3] | GBP1] | Associated Disease |
| HDC01676 | CHRNA7 | NM_000746 | −2.3 | 0.6 | 1.0 | Schizophrenia, neurophysiologic defect in (2) |
| CG4349 | FTH1 | NM_002032 | −4.1 | 0.4 | 1.3 | Iron overload, autosomal dominant (2) |
| TSG101 | TSG101 | NM_006292 | 3.1 | 2.0 | 1.2 | Breast cancer (2) |
| bon | TRIM33 | NM_015906 | 5.6 | 0.4 | 1.3 | Thyroid carcinoma, papillary (2) |
| mask | MLL3 | NM_021230 | −2.3 | 1.2 | 0.5 | Myeloid leukemia (6) |
| enok | MYST3 | NM_006766 | 3.0 | 0.8 | 2.3 | Acute myeloid leukemia (5) |
| Caf1 | RBBP4 | NM_005610 | 3.0 | 1.1 | 2.0 | Refsum disease (1) |
| Rab5 | RAB5A | NM_004162 | 2.1 | 2.8 | 1.9 | |
| CG31694 | IFRD2 | NM_006764 | −2.8 | 2.2 | 2.4 | Small cell lung cancer (4) |
| sol | CAPN3 | NM_000070 | −2.5 | 2.5 | 2.0 | Muscular dystrophy, limb-girdle, type 2A (1) |
| CG31132 | BRODL | NM_153252 | −2.8 | 1.1 | 0.6 | Leukemia (3) |
| CG15434 | NDUFA2 | NM_002488 | −2.5 | 3.8 | 3.7 | Muscular dystrophy, limb-girdle, 1A (2) |
| CG3819 | ENDOGL1 | NM_005107 | −2.3 | 0.9 | 1.9 | Carcinomas of lung, uterus, esophagus, kidney (7) |
| CG31005 | TPRT | NM_014317 | −2.3 | 0.5 | 0.4 | |
| Pp1alpha-96A | PPP1CC | NM_002710 | 3.0 | 0.4 | 2.1 | |
| CG10077 | DDX5 | NM_004396 | 2.8 | 0.8 | 3.9 | |
| CG17492 | LOC142678 | NM_080875 | 2.5 | 2.4 | 2.4 | |
| kn | DKFZP667B0210 | NM_024007 | −2.4 | 2.0 | 1.3 | |
| CG31132 | C21ORF107 | NM_018963 | −2.8 | 0.5 | 0.5 | |
| Pp1alpha-96A | PPP1CA | NM_002708 | 3.0 | 0.8 | 3.2 | |
| CtBP | CTBP2 | NM_001329 | −2.9 | 0.5 | 0.8 | |
| PP2A-B′ | PPP2R5D | NM_006245 | 2.6 | 1.9 | 1.6 | |
| Nup154 | NUP155 | NM_004298 | 2.9 | 1.6 | 2.0 | |
| mask | ANKHD1 | NM_017747 | −2.3 | 0.6 | 1.9 | |
| Art2 | HRMT1L4 | NM_019854 | −2.9 | 0.6 | 2.9 | |
| CG18112 | C14ORF133 | NM_022067 | 2.1 | 1.2 | 1.7 | |
| I(1)G0084 | PHF10 | NM_018288 | −2.1 | 0.5 | 0.7 | |

References:
(1) data sets were downloaded from Homophila Version 2.1 (update 13 Apr 2005). Originally published: Chien, S., Reiter, L. T., Bier, E. and Griboskov M. Homophila: human disease gene cognates in Drosophila. Nucleic Acids Research 30: 149-151 (2002)
(2) data sets from: Online Mendelian Inheritance in Man, OMIM (TM). McKusick-Nathans Institute for Genetic Medicine, Johns Hopkins University (Baltimore, MD) and National Center for Biotechnology Information, National Library of Medicine (Bethesda, MD), 2000. World Wide Web URL: http://www.ncbi.nlm.nih.gov/omim/
(3) information from: Kalla, C., Nentwich, H., Schlotter, M., Mertens, D., Wildenberger, K., Dohner, H., Stilgenbauer, S. and Lichter, P. Translocation t (X; 11)(q13; q23) in B-cell chronic lymphocytic leukemia disrupts two novel genes. Genes Chromosomes Cancer 42 (2): 128-143 (2005)
(4) information from: Latif F., Duh, F. M., Bader, S., Sekido, Y., Li, H., Geil, L., Zbar, B. Minna, J. D. and Lerman, M. I. The human homolog of the rodent immediate early response genes, PC4 and TIS7, resides in the lung cancer tumor suppressor gene region on chromosome 3p21. Hum Genet 99 (3): 334-341 (1997)
(5) information from: Borrow, J., Stanton, V. P., Jr., Andresen, J. M., Becher, R., Behm, F. G., Chaganti, R. S. K., Civin, C. I., Disteche, C., Dube, I., Frischauf, A. M., Horsman, D., Mitelman, F., Volinia, S., Watmore, A. E., Housman, D. E. The translocation t(8; 16)(p11; p13) of acute myeloid leukaemia fuses a putative acetyltransferase to the CREB-binding protein. Nature Genet. 14: 33-41 (1996)
(6) information from: Ruault, M., Brun, M. E., Ventura, M., Roizes, G., De Sario, A. MLL3, a new human member of the TRX/MLL gene family, maps to 7q36, a chromosome region frequently deleted in myeloid leukaemia. Gene 284: 73-81 (2002)
(7) information from: Daigo, Y., Isomura, M., Nishiwaki, T., Tamari, M., Ishikawa, S., Kai, M., Murata, Y., Takeuchi, K., Yamane, Y., Hayashi, R., Minami, M., Fujino, M. A., Hojo, Y., Uchiyama, I., Takagi, T., Nakamura, Y. Characterization of a 1200-kb genomic segment of chromosome 3p22-p21.3. DNA Res. 6: 37-44 (1999)

1. A method for identifying a compound capable of modulating the activity of the JAK/STAT pathway, comprising
a contacting a compound with at least one target molecule selected from
i nucleic acid molecules, comprising
ii a nucleotide sequence as shown in SEQ ID NOs. 88 to 265;
iii a nucleotide sequence which is complementary to a nucleotide sequence of (i.1);
iv a nucleotide sequence which has an identity of at least 65% to a nucleotide sequence of (i.1) or (i.2); and/or
v a nucleotide sequence which hybridizes under stringent conditions to a nucleotide sequence of (i.1), (i.2) or (i.3); and
ii polypeptide molecules
iii encoded by the nucleic acid molecules of (i) and/or
iv having the sequences as shown in SEQ ID NOs. 1-87, and
b determining the degree of modulation of the at least one target molecule by the compound.

2. The method according to claim 1, wherein the compound is selected from compounds capable of directly and/or indirectly inhibiting or activating the transcription or translation of a nucleic acid molecule of (i).

3. The method according to claim 2, wherein the compounds capable of directly and/or indirectly inhibiting or activating the transcription or translation of a nucleic acid molecule of (i) comprise polypeptides such as proteins, enzymes, antibodies, polypeptide inhibitors, polypeptide activators, agonist, antagonists, mimetics, low molecular weight substances, antisense molecules, RNAi molecules and ribozymes.

4. The method according to claim 1, wherein the compound is selected from compounds capable of directly and/or indirectly inhibiting or activating a polypeptide molecule of (ii).

5. The method according to claim 4, wherein the compounds capable of directly and/or indirectly inhibiting or activating a polypeptide molecule of (ii) comprise polypeptides such as proteins, enzymes, antibodies, polypeptide inhibitors, polypeptide activators, agonist, antagonists, mimetics, oligopeptides, low molecular weight substances and cofactors.

6. The method according to claim 1, wherein the compound is an antibody or fragment thereof and wherein the antibody or fragment thereof is directed against a polypeptide molecule of (ii).

7. The method according to claim 1, wherein the compound is an antisense molecule and wherein the antisense molecule is directed against a nucleic acid molecule of (i).

8. The method according to claim 1, wherein the compound is an RNAi molecule.

9. The method according to claim 1, wherein the degree of modulation of the at least one target molecule by the compound is determined by measuring the amount and/or expression rate of the nucleic acid molecule of (i).

10. The method according to claim 1, wherein the degree of modulation of the at least one target molecule by the compound is determined by measuring the amount and/or activity of the polypeptide molecule of (ii).

11. The method according to claim 1, wherein the method is a molecular based assay.

12. The method according to claim 1, wherein the method is a cellular assay.

13. Use of at least one molecule selected from
i nucleic acid molecules, comprising
ii a nucleotide sequence as shown in SEQ ID NOs. 88 to 265;
iii a nucleotide sequence which is complementary to a nucleotide sequence of (i.1);
iv a nucleotide sequence which has an identity of at least 65% to a nucleotide sequence of (i.1) or (i.2); and/or
v a nucleotide sequence which hybridizes under stringent conditions to a nucleotide sequence of (i.1), (i.2) or (i.3); and
ii polypeptide molecules
iii encoded by the nucleic acid molecules of (i) and/or
iv having the sequences as shown in SEQ ID NOs. 1-87,
as a target for the modulation of the activity of the JAK/STAT pathway.

14. A method for modulating the activity of the JAK/STAT pathway comprising contacting a cell with at least one molecule selected from
i nucleic acid molecules, comprising
ii a nucleotide sequence as shown in SEQ ID NOs. 88 to 265;
iii a nucleotide sequence which is complementary to a nucleotide sequence of (i.1);
iv a nucleotide sequence which has an identity of at least 65% to a nucleotide sequence of (i.1) or (i.2); and/or
v a nucleotide sequence which hybridizes under stringent conditions to a nucleotide sequence of (i.1), (i.2) or (i.3);
vi polypeptide molecules
vii encoded by the nucleic acid molecules of (i) and/or
viii having the sequences as shown in SEQ ID NOs. 1-87, and
ii effector molecules of (i) and/or (ii).

15. The method according to claim 14, wherein the effector molecules of (i) and/or (ii) are selected from antibodies or fragments thereof which are directed against a polypeptide molecule of (ii), antisense molecules which are directed against a nucleic acid molecule of (i) and RNAi molecules.

16. A pharmaceutical composition comprising as an active agent at least one molecule selected from
i nucleic acid molecules, comprising
ii a nucleotide sequence as shown in SEQ ID NOs. 88 to 265;
iii a nucleotide sequence which is complementary to a nucleotide sequence of (i.1);
iv a nucleotide sequence which has an identity of at least 65% to a nucleotide sequence of (i.1) or (i.2); and/or
v a nucleotide sequence which hybridizes under stringent conditions to a nucleotide sequence of (i.1), (i.2) or (i.3);
vi polypeptide molecules
vii encoded by the nucleic acid molecules of (i) and/or
viii having the sequences as shown in SEQ ID NOs. 1-87, and
ii effector molecules of (i) and/or (ii).

17. The pharmaceutical composition according to claim 16, wherein the effector molecules of (i) and/or (ii) are selected from antibodies or fragments thereof which are directed against a polypeptide molecule of (ii), antisense molecules which are directed against a nucleic acid molecule of (i) and RNAi molecules.

18. The pharmaceutical composition according to claim 16, optionally containing pharmaceutically acceptable carriers, diluents and/or adjuvants.

19. The pharmaceutical composition according to claim 16 for the diagnosis, prevention or treatment of a JAK/STAT pathway associated disorder.

20. The pharmaceutical composition according to claim 16, wherein the JAK/STAT pathway associated disorder is selected from the group consisting of papillary thyroid carcinoma, Refsum disease, blood-brain barrier glucose transport defect, X-linked nonsyndromic mental retardation, long QT syndrome 4, subcortical laminar heterotopia, leukemia, steroid-resistant nephrotic syndrome, invasive pituitary tumor, sporadic Sotos syndrome, autosomal dominant iron overload, hereditary pancreatitis, stomatocytosis I, atypical Rett syndrome, phosphoglycerate dehydrogenase deficiency, Wolman disease, neurophysiologic defect in schizophrenia, autosomal recessive SCID (T-negative/B-positive type), atelostogenesis (type I), Larson syndrome, spondylocarpotarsal synostosis syndrome, frontometaphyseal dysplasia, diabetes mellitus (type II), susceptibility to insulin resistance, Griscelli Syndrome, limb-girdle muscular dystrophy (type 2A), growth hormone insensitivity with immunodeficiency and breast cancer.

21. A method for the diagnosis, prevention or treatment of a JAK/STAT pathway associated disorder comprising administering
nucleic acid molecules, comprising
ii a nucleotide sequence as shown in SEQ ID NOs. 88 to 265;
iii a nucleotide sequence which is complementary to a nucleotide sequence of (i.1);
iv a nucleotide sequence which has an identity of at least 65% to a nucleotide sequence of (i.1) or (i.2); and/or
v a nucleotide sequence which hybridizes under stringent conditions to a nucleotide sequence of (i.1), (i.2) or (i.3);
vi polypeptide molecules
vii encoded by the nucleic acid molecules of (i) and/or
viii having the sequences as shown in SEQ ID NOs. 1-87, or
ii effector molecules of (i) and/or (ii).

22. A method according to claim 21, wherein the effector molecules of (i) and/or (ii) are selected from antibodies or fragments thereof which are directed against a polypeptide molecule of (ii), antisense molecules which are directed against a nucleic acid molecule of (i) and RNAi molecules.

23. Use according to claim 21, wherein the JAK/STAT pathway associated disorder is selected from the group consisting of papillary thyroid carcinoma, Refsum disease, blood-brain barrier glucose transport defect, X-linked nonsyndromic mental retardation, long QT syndrome 4, subcortical laminar heterotopia, leukemia, steroid-resistant nephrotic syndrome, invasive pituitary tumor, sporadic Sotos syndrome, autosomal dominant iron overload, hereditary pancreatitis, stomatocytosis I, atypical Rett syndrome, phosphoglycerate dehydrogenase deficiency, Wolman disease, neurophysiologic defect in schizophrenia, autosomal recessive SCID (T-negative/B-positive type), atelostogenesis (type I), Larson syndrome, spondylocarpotarsal synostosis syndrome, frontometaphyseal dysplasia, diabetes mellitus (type II), susceptibility to insulin resistance, Griscelli Syndrome, limb-girdle muscular dystrophy (type 2A), growth hormone insensitivity with immunodeficiency and breast cancer.

The application's sequence listing, which the Patent Office published only in electronic form, follows.

SEQUENCE LISTING (447 sequences)

SEQ ID NO: 1 - protein, 334 aa, Homo sapiens
MSKLLNPEEMTSRDYYFDSYAHFGIHEEMLKDEVRTLTYRNSMYHNKHVFKDKVVLDVGSGTGILSMFAAKAGAKKVFGIECSSISDYSQKIIKANHLDNIITIFKGKVEEVELPVEKVDIIISEWMGYCLFYESMLNTVIFARDKWLKPGGLMFPDRAALYVVAIEDRQYKDFKIHWWENVYGFDMTCIRDVAMKEPLVDIVDPKQVVTNACLIKEVDIYTVKTEELSFTSAFCLQIQRNDYVHALVTYFNIEFTKCHKKMGFSTAPDAPYTHWKQTVFYLEDYLTVRRGEEIYGTISMKPNAKNVRDLDFTVDLDFKGQLCETSVSNDYKMR

SEQ ID NO: 2 - protein, 204 aa, Homo sapiens
MAKVQVNNVVVLDNPSPFYNPFQFEITFECIEDLSEDLEWKIIYVGSAESEEYDQVLDSVLVGPVPAGRHMFVFQADAPNPGLIPDADAVGVTVVLITCTYRGQEFIRVGYYVNNEYTETELRENPPVKPDFSKLQRNILASNPRVTRFHINWEDNTEKLEDAESSNPNLQSLLSTDALPSASKGWSTSENSLNVMLESHMDCM

SEQ ID NO: 3 - protein, 689 aa, Homo sapiens
MIEMAAEKEPFLVPAPPPPLKDESGGGGGPTVPPHQEAASGELRGGTERGPGRCAPSAGSPAAAVGRESPGAAATSSSGPQAQQHRGGGPQAQSHGEARLSDPPGRAAPPDVGEERRGGGGTELGPPAPPRPRNGYQPHRPPGGGGGKRRNSCNVGGGGGGFKHPAFKRRRRVNSDCDSVLPSNFLLGGNIFDPLNLNSLLDEEVSRTLNAETPKSSPLPAKGRDPVEILIPKDITDPLSLNTCTDEGHVVLASPLKTGRKRHRHRGQHHQQQQAAGGSESHPVPPTAPLTPLLHGEGASQQPRHRGQNRDAPQPYELNTAINCRDEVVSPLPSALQGPSGSLSAPPAASVISAPPSSSSRHRKRRRTSSKSEAGARGGGQGSKEKGRGSWGGRHHHHHPLPAAGFKKQQRKFQYGNYCKYYGYRNPSCEDGRLRVLKPEWFRGRDVLDLGCNVGHLTLSIACKWGPSRMVGLDIDSRLIHSARQNIRHYLSEELRLPPQTLEGDPGAEGEEGTTTVRKRSCFPASLTASRGPIAAPQVPLDGADTSVFPNNVVFVTGNYVLDRDDLVEAQTPEYDVVLCLSLTKWVHLNWGDEGLKRMFRRIYRHLRPGGILVLEPQPWSSYGKRKTLTETIYKNYYRIQLKPEQFSSYLTSPDVGFSSYELVATPHNTSKGFQRPVYLFHKARSPSH

SEQ ID NO: 4 - protein, 1127 aa, Homo sapiens
MAENKGGGEAESGGGGSGSAPVTAGAAGPAAQEAEPPLTAVLVEEEEEEGGRAGAEGGAAGPDDGGVAAASSGSAQAASSPAASVGTGVAGGAVSTPAPAPASAPAPGPSAGPPPGPPASLLDTCAVCQQSLQSRREAEPKLLPCLHSFCLRCLPEPERQLSVPIPGGSNGDIQQVGVIRCPVCRQECRQIDLVDNYFVKDTSEAPSSSDEKSEQVCTSCEDNASAVGFCVECGEWLCKTCIEAHQRVKFTKDHLIRKKEDVSESVGASGQRPVFCPVHKQEQLKLFCETCDRLTCRDCQLLEHKEHRYQFLEEAFQNQKGAIENLLAKLLEKKNYVHFAATQVQNRIKEVNETNKRVEQEIKVAIFTLINEINKKGKSLLQQLENVTKERQMKLLQQQNDITGLSRQVKHVMNFTNWAIASGSSTALLYSKRLITFQLRHILKARCDPVPAANGAIRFHCDPTFWAKNVVNLGNLVIESKPAPGYTPNVVVGQVPPGTNHISKTPGQINLAQLRLQHMQQQVYAQKHQQLQQMRMQQPPAPVPTTTTTTQQHPRQAAPQMLQQQPPRLISVQTMQRGNMNCGAFQAHQMRLAQNAARIPGIPRHSGPQYSMMQPHLQRQHSNPGHAGPFPVVSVHNTTINPTSPTTATMANANRGPTSPSVTAIELIPSVTNPENLPSLPDIPPIQLEDAGSSSLDNLLSRYISGSHLPPQPTSTMNPSPGPSALSPGSSGLSNSHTPVRPPSTSSTGSRGSCGSSGRTAEKTSLSFKSDQVKVKQEPGTEDEICSFSGGVKQEKTEDGRRSACMLSSPESSLTPPLSTNLHLESELDALASLENHVKTEPADMNESCKQSGLSSLVNGKSPIRSLMHRSARIGGDGNNKDDDPNEDWCAVCQNGGDLLCCEKCPKVFHLTCHVPTLLSFPSGDWICTFCRDIGKPEVEYDCDNLQHSKKGKTAQGLSPVDQRKCERLLLYLYCHELSIEFQEPVPASIPNYYKIIKKPMDLSTVKKKLQKKHSQHYQIPDDFVADVRLIFKNCERFNEMMKVVQVYADTQEINLKADSEVAQAGKAVALYFEDKLTEIYSDRTFAPLPEFEQEEDDGEVTEDSDEDFIQPRRKRLKSDERPVHIK

SEQ ID NO: 5 - protein, 425 aa, Homo sapiens
MADKEAAFDDAVEERVINEEYKIWKKNTPFLYDLVMTHALEWPSLTAQWLPDVTRPEGKDFSIHRLVLGTHTSDEQNHLVIASVQLPNDDAQFDASHYDSEKGEFGGFGSVSGKIEIEIKINHEGEVNRARYMPQNPCIIATKTPSSDVLVFDYTKHPSKPDPSGECNPDLRLRGHQKEGYGLSWNPNLSGHLLSASDDHTICLWDISAVPKEGKVVDAKTIFTGHTAVVEDVSWHLLHESLFGSVADDQKLMIWDTRSNNTSKPSHSVDAHTAEVNCLSFNPYSEFILATGSADKTVALWDLRNLKLKLHSFESHKDEIFQVQWSPHNETILASSGTDRRLNVWDLSKIGEEQSPEDAEDGPPELLFIHGGHTAKISDFSWNPNEPWVICSVSEDNIMQVWQMAENIYNDEDPEGSVDPEGQGS

SEQ ID NO: 6 - protein, 371 aa, Homo sapiens
MAWTKYQLFLAGLMLVTGSINTLSAKWADNFMAEGCGGSKEHSFQHPFLQAVGMFLGEFSCLAAFYLLRCRAAGQSDSSVDPQQPFNPLLFLPPALCDMTGTSLMYVALNMTSASSFQMLRGAVIIFTGLFSVAFLGRRLVLSQWLGILATIAGLVVVGLADLLSKHDSQHKLSEVITGDLLIIMAQIIVAIQMVLEEKFVYKHNVHPLRAVGTEGLFGFVILSLLLVPMYYIPAGSFSGNPRGTLEDALDAFCQVGQQPLIAVALLGNISSIAFFNFAGISVTKELSATTRMVLDSLRTVVIWALSLALGWEAFHALQILGFLILLIGTALYNGLHRPLLGRLSRGRPLAEESEQERLLGGTRTPINDAS

SEQ ID NO: 7 - protein, 614 aa, Homo sapiens
MSGYSSDRDRGRDRGFGAPRFGGSRAGPLSGKKFGNPGEKLVKKKWNLDELPKFEKNFYQEHPDLARRTAQEVETYRRSKEITVRGHNCPKPVLNFYEANFPANVMDVIARQNFTEPTAIQAQGWPVALSGLDMVGVAQTGSGKTLSYLLPAIVHINHQPFLERGDGPICLVLAPTRELAQQVQQVAAEYCRACRLKSTCIYGGAPKGPQIRDLERGVEICIATPGRLIDFLECGKTNLRRTTYLVLDEADRMLDMGFEPQIRKIVDQIRPDRQTLMWSATWPKEVRQLAEDFLKDYIHINIGALELSANHNILQIVDVCHDVEKDEKLIRLMEEIMSEKENKTIVFVETKRRCDELTRKMRRDGWPAMGIHGDKSQQERDWVLNEFKHGKAPILIATDVASRGLDVEDVKFVINYDYPNSSEDYIHRIGRTARSTKTGTAYTFFTPNNIKQVSDLISVLREANQAINPKLLQLVEDRGSGRSRGRGGMKDDRRDRYSAGKRGGFNTFRDRENYDRGYSSLLKRDFGAKTQNGVYSAANYTNGSFGSNFVSAGIQTSFRTGNPTGTYQNGYDSTQQYGSNVPNMHNGMNQQAYAYPATAAAPMIGYPMPTGYSQ

SEQ ID NO: 8 - protein, 477 aa, Homo sapiens
MTPEDPEETQPLLGPPGGSAPRGRRVFLAAFAAALGPLSFGFALGYSSPAIPSLQRAAPPAPRLDDAAASWFGAVVTLGAAAGGVLGGWLVDRAGRKLSLLLCSVPFVAGFAVITAAQDVWMLLGGRLLTGLACGVASLVAPVYISEIAYPAVRGLLGSCVQLMVVVGILLAYLAGWVLEWRWLAVLGCVPPSLMLLLMCFMPETPRFLLTQHRRQEAMAALRFLWGSEQGWEDPPIGAEQSFHLALLRQPGIYKPFIIGVSLMAFQQLSGVNAVMFYAETIFEEAKFKDSSLASVVVGVIQVLFTAVAALIMDRAGRRLLLVLSGVVMVFSTSAFGAYFKLTQGGPGNSSHVAISAPVSAQPVDASVGLAWLAVGSMCLFIAGFAVGWGPIPWLLMSEIFPLHVKGVATGICVLTNWLMAFLVTKEFSSLMEVLRPYGAFWLASAFCIFSVLFTLFCVPETKGKTLEQITAHFEGR

SEQ ID NO: 9 - protein, 544 aa, Homo sapiens
MLNMQGAEERDIRRETCPGWVNKNKPALEQDVCKIDSSGIVVKRFQEDEYQDSTFEEKYACEGMKENSPREIAESCLFQEGGFGRITFIHKEAPPEIISQGYNFEKSLLLTSSLVTRLRVSTEESLHQWETSNIQTNDISDQSKCPTLCTQKKSWKCNECGKTFTQSSSLTQHQRTHTGERPYTCEECGKAFSRSSFLVQHQRIHTGVKPYGCEQCGKTFRCRSFLTQHQRIHTGEKPYKCNECGNSFRNHSHLTEHQRIHTGEKPYKCNRCGKAFNQNTHLIHHQRIHTGEKPYICSECGSSFRKHSNLTQHQRIHTGEKPHKCDECGKTFQTKANLSQHQRIHSGEKPYKCKECGKAFCQSPSLIKHQRIHTGEKPYKCKECGKAFTQSTPLTKHQRIHTGERPYKCSECGKAFIQSICLIRHQRSHTGEKPYKCNECGKGFNQNTCLTQHMRIHTGEKPYKCKECGKAFAHSSSLTEHHRTHTGEKLYKCSECEKTFRKYAHLSEHYRIHTGEKPYECIECGKFFRHSSVLFRHQKLHSGD

SEQ ID NO: 10 - protein, 707 aa, Homo sapiens
MSRDRFRSRGGGGGGFHRRGGGGGRGGLHDFRSPPPGMGLNQNRGPMGPGPGQSGPKPPIPPPPPHQQQQQPPPQQPPPQQPPPHQPPPHPQPHQQQQPPPPPQDSSKPVVAQGPGPAPGVGSAPPASSSAPPATPPTSGAPPGSGPGPTPTPPPAVTSAPPGAPPPTPPSSGVPTTPPQAGGPPPPPAAVPGPGPGPKQGPGPGGPKGGKMPGGPKPGGGPGLSTPGGHPKPPHRGGGEPRGGRQHHPPYHQQHHQGPPPGGPGGRSEEKISDSEGFKANLSLLRRPGEKTYTQRCRLFVGNLPADITEDEFKRLFAKYGEPGEVFINKGKGFGFIKLESRALAEIAKAELDDTPMRGRQLRVRFATHAAALSVRNLSPYVSNELLEEAFSQFGPIERAVVIVDDRGRSTGKGIVEFASKPAARKAFERCSEGVFLLTTTPRPVIVEPLEQLDDEDGLPEKLAQKNPMYQKERETPPRFAQHGTFEYEYSQRWKSLDEMEKQQREQVEKNMKDAKDKLESEMEDAYHEHQANLLRQDLMRRQEELRRMEELHNQEMQKRKEMQLRQEEERRRREEEMMIRQREMEEQMRRQREESYSRMGYMDPRERDMRMGGGGAMNMGDPYGSGGQKFPPLGGGGGIGYEANPGVPPATMSGSMMGSDMRTERFGQGGAGPVGGQGPRGMGPGTPAGYGRGREEYEGPNKKPRF

SEQ ID NO: 11 - protein, 166 aa, Homo sapiens
MAQRLLLRRFLASVISRKPSQGQWPPLTSRALQTPQCSPGGLTVTPNPARTIYTTRISLTTFNIQDGPDFQDRVVNSETPVVVDFHAQWCGPCKILGPRLEKMVAKQHGKVVMAKVDIDDHTDLAIEYEVSAVPTVLAMKNGDVVDKFVGIKDEDQLEAFLKKLIG

SEQ ID NO: 12 - protein, 268 aa, Homo sapiens
MAVNVYSTSVTSDNLSRHDMLAWINESLQLNLTKIEQLCSGAAYCQFMDMLFPGSIALKKVKFQAKLEHEYIQNFKILQAGFKRMGVDKIIPVDKLVKGKFQDNFEFVQWFKKFFDANYDGKDYDPVAARQGQETAVAPSLVAPALNKPKKPLTSSSAAPQRPISTQRTAAAPKAGPGVVRKNPGVGNGDDEAAELMQQVNVLKLTVEDLEKERDFYFGKLRNIELICQENEGENDPVLQRIVDILYATDEGFVIPDEGGPQEEQEEY

SEQ ID NO: 13 - protein, 235 aa, Homo sapiens
MDPARPLGLSILLLFLTEAALGDAAQEPTGNNAEICLLPLDYGPCRALLLRYYYDRYTQSCRQFLYGGCEGNANNFYTWEACDDACWRIEKVPKVCRLQVSVDDQCEGSTEKYFFNLSSMTCEKFFSGGCHRNRIENRFPDEATCMGFCAPKKIPSFCYSPKDEGLCSANVTRYYFNPRYRTCDAFTYTGCGGNDNNFVSREDCKRACAKALKKKKKMPKLRFASRIRKIRKKQF

SEQ ID NO: 14 - protein, 99 aa, Homo sapiens
MAAAAASRGVGAKLGLREIRIHLCQRSPGSQGVRDFIEKRYVELKKANPDLPILIRECSDVQPKLWARYAFGQETNVPLNNFSADQVTRALENVLSGKA

SEQ ID NO: 15 - protein, 791 aa, Homo sapiens
MADDKVAILTDDEEEQKRKYVLADPFNGISREPEPPSNETPSSTETSAIPEEEIDWIEKHCVKINNDLLISKVFYFFFYSAYGSLYPLLPVYYKQLGMSPSQSGLLVGIRYFIEFCSAPFWGVVADRFKKGKIVLLFSLLCWVLFNLGIGFVKPATLRCVPKIRPTTHPTNASHQLTILPTNSSFTSFLTISPKMREKRNLLETGLNVSDTVTLPTAPNMNSEPTLQPQTGEITNRMMDLTLNSSTATPVSPGSVTKETTTVIVTTTKSLPSDQVMLVYDQQEVEAIFLVILVVVIIGEFFSASSVTIVDTVTLQYLGKHRDRYGLQRMWGSLGWGLAMLSVGIGIDYTHIEVLIDGKGCKPPEYRNYQIVFIVFGVLMTMALIVATQFRFRYNHFKNDDSKGKEVEIPQVERNNSTESSEETPTTTSHSQAFNFWDLIKLLCSVQYGSVLFVAWFMGFGYGFVFTFLYWHLEDLNGTTTLFGVCSVLSHVSELTAYFFSHKLIELIGHIRVLYIGLACNTARYIYISYLENAWTVLPMEVLQGVTHAAIWAACISYLSAAVPPELRTSAQGILQGLHLGLGRGCGAMIGGVLVNYFGAAATFRGIGMACLVILLLFALIQWLAVPDEEEDKTMLAERIPVPSSPVPIATIDLVQQQTEDVMPRIEPRLPPKKTKHQEEQEDVNKPAWGVSSSPWVTFVYALYQIKEMMQLTRDNRASEIQPLQGTNENRENSPAGRAQPVPCETHSDPSRNQPSPDAAASQTQTSPAHPSVDPCTEESEEQQAQLAAGGH

SEQ ID NO: 16 - protein, 526 aa, Homo sapiens
MASGPHSTATAAAAASSAAPSAGGSSSGTTTTTTTTTGGILIGDRLYSEVSLTIDHSLIPEERLSPTPSMQDGLDLPSETDLRILGCELIQAAGILLRLPQVAMATGQVLFHRFFYSKSFVKHSFEIVAMACINLASKIEEAPRRIRDVINVFHHLRQLRGKRTPSPLILDQNYINTKNQVIKAERRVLKELGFCVHVKHPHKIIVMYLQVLECERNQTLVQTAWNYMNDSLRTNVFVRFQPETIACACIYLAARALQIPLPTRPHWFLLFGTTEEEIQEICIETLRLYTRKKPNYELLEKEVEKRKVALQEAKLKAKGLNPDGTPALSTLGGFSPASKPSSPREVKAEEKSPISINVKTVKKEPEDRQQASKSPYNGVRKDSKRSRNSRSASRSRSRTRSRSRSHTPRRHYNNRRSRSGTYSSRSRSRSRSHSESPRRHHNHGSPHLKAKHTRDDLKSSNRHGHKRKKSRSRSQSKSRDHSDAAKKHRHERGHHRDRRERSRSFERSHKSKHHGGSRSGHGRHRR

SEQ ID NO: 17 - protein, 705 aa, Homo sapiens
MEKPRSIEETPSSEPMEEEEDDDLELFGGYDSFRSYNSSVGSESSSYLEESSEAENEDREAGELPTSPLHLLSPGTPRSLDGSGSEPAVCEMCGIVGTREAFFSKTKRFCSVSCSRSYSSNSKKASILARLQGKPPTKKAKVLHKAAWSAKIGAFLHSQGTGQLADGTPTGQDALVLGFDWGKFLKDHSYKAAPVSCFKHVPLYDQWEDVMKGMKVEVLNSDAVLPSRVYWIASVIQTAGYRVLLRYEGFENDASHDFWCNLGTVDVHPIGWCAINSKILVPPRTIHAKFTDWKGYLMKRLVGSRTLPVDFHIKMVESMKYPFRQGMRLEVVDKSQVSRTRMAVVDTVIGGRLRLLYEDGDSDDDFWCHMWSPLIHPVGWSRRVGHGIKMSERRSDMAHHPTFRKIYCDAVPYLFKKVRAVYTEGGWFEEGMKLEAIDPLNLGNICVATVCKVLLDGYLMICVDGGPSTDGLDWFCYHASSHAIFPATFCQKNDIELTPPKGYEAQTFNWENYLEKTKSKAAPSRLFNMDCPNHGFKVGMKLEAVDLMEPRLICVATVKRVVHRLLSIHFDGWDSEYDQWVDCESPDIYPVGWCELTGYQLQPPVAAEPATPLKAKEATKKKKKQFGKKRKRIPPTKTRPLRQGSKKPLLEDDPQGARKISSEPVPGEIIAVRVKEEHLDVASPDKASSPELPVSVENIKQETDD

SEQ ID NO: 18 - protein, 1013 aa, Homo sapiens
MGWKPSEARGQSQSFQASGLQPRSLKAARRATGRPDRSRAARPTTDPSAHRSRAAPPNMDPDPQAGVQVGMRVVRGVDWKWGQQDGGEGGVGTVVELGRHGSPSTPDRTVVVQWDQGTRTNYRAGYQGAHDLLLYDNAQIGVRHPNIICDCCKKHGLRGMRWKCRVCLDYDLCTQCYMHNKHELAHAFDRYETAHSRPVTLSPRQGLPRIPLRGIFQGAKVVRGPDWEWGSQDGGEGKPGRVVDIRGWDVETGRSVASVTWADGTTNVYRVGHKGKVDLKCVGEAAGGFYYKDHLPRLGKPAELQRRVSADSQPFQHGDKVKCLLDTDVLREMQEGHGGWNPRMAEFIGQTGTVHRITDRGDVRVQFNHETRWTFHPGALTKHHSFWVGDVVRVIGDLDTVKRLQAGHGEWTDDMAPALGRVGKVVKVFGDGNLRVAVAGQRWTFSPSCLVAYRPEEDANLDVAERARENKSSLSVALDKLRAQKSDPEHPGRLVVEVALGNAARALDLLRRRPEQVDTKNQGRTALQVAAYLGQVELIRLLLQARAGVDLPDDEGNTALHYAALGNQPEATRVLLSAGCRADAINSTQSTALHVAVQRGFLEVVRALCERGCDVNLPDAHSDTPLHSAISAGTGASGIVEVLTEVPNIDVTATNSQGFTLLHHASLKGHALAVRKILARARQLVDAKKEDGFTALHLAALNNHREVAQILIREGRCDVNVRNRKLQSPLHLAVQQAHVGLVPLLVDAGCSVNAEDEEGDTALHVALQRHQLLPLVADGAGGDPGPLQLLSRLQASGLPGSAELTVGAAVACFLALEGADVSYTNHRGRSPLDLAAEGRVLKALQGCAQRFRERQAGGGAAPGPRQTLGTPNTVTNLHVGAAPGPEAAECLVCSELALLVLFSPCQHRTVCEECARRMKKCIRCQVVVSKKLRPDGSEVASAAPAPGPPRQLVEELQSRYRQMEERITCPICIDSHIRLVFQCGHGACAPCGSALSACPICRQPIRDRIQIFV

SEQ ID NO: 19 - protein, 493 aa, Homo sapiens
MNRTKGDEEEYWNSSKFKAFTFDDEDDELSQLKESKRAVNSLRDFVDDDDDDDLERVSWSGEPVGSISWSIRETAGNSGSTHEGREQLKSRNSFSSYAQLPKPTSTYSLSSFFRGRTRPGSFQSLSDALSDTPAKSYAPELGRPKGEYRDYSNDWSPSDTVRRLRKGKVCSLERFRSLQDKLQLLEEAVSMHDGNVITAVLIFLKRTLSKEILFRELEVRQVALRHLIHFLKEIGDQKLLLDLFRFLDRTEELALSHYREHLNIQDPDKRKEFLKTCVGLPFSAEDSAHIQDHYTLLERQIIIEANDRHLESAGQTEIFRKHPRKASILNMPLVTTLFYSCFYHYTEAEGTFSSPVNLKKTFKIPDKQYVLTALAARAKLRAWNDVDALFTTKNWLGYTKKRAPIGFHRVVEILHKNNAPVQILQEYVNLVEDVDTKLNLATKFKCHDVVIDTYRDLKDRQQLLAYRSKVDKGSAEEEKIDALLSSSQIRWKN

SEQ ID NO: 20 - protein, 856 aa, Homo sapiens
MDVRRLKVNELREELQRRGLDTRGLKAELAERLQAALEAEEPDDERELDADDEPGRPGHINEEVETEGGSELEGTAQPPPPGLQPHAEPGGYSGPDGHYAMDNITRQNQFYDTQVIKQENESGYERRPLEMEQQQAYRPEMKTEMKQGAPTSFLPPEASQLKPDRQQFQSRKRPYEENRGRGYFEHREDRRGRSPQPPAEEDEDDFDDTLVAIDTYNCDLHFKVARDRSSGYPLTIEGFAYLWSGARASYGVRRGRVCFEMKINEEISVKHLPSTEPDPHVVRIGWSLDSCSTQLGEEPFSYGYGGTGKKSTNSRFENYGDKFAENDVIGCFADFECGNDVELSFTKNGKWMGIAFRIQKEALGGQALYPHVLVKNCAVEFNFGQRAEPYCSVLPGFTFIQHLPLSERIRGTVGPKSKAECEILMMVGLPAAGKTTWAIKHAASNPSKKYNILGTNAIMDKMRVMGLRRQRNYAGRWDVLIQQATQCLNRLIQIAARKKRNYILDQTNVYGSAQRRKMRPFEGFQRKAIVICPTDEDLKDRTIKRTDEEGKDVPDHAVLEMKANFTLPDVGDFLDEVLFIELQREEADKLVRQYNEEGRKAGPPPEKRFDNRGGGGFRGRGGGGGFQRYENRGPPGGNRGGFQNRGGGSGGGGNYRGGFNRSGGGGYSQNRWGNNNRDNNNSNNRGSYNRAPQQQPPPQQPPPPQPPPQQPPPPPSYSPARNPPGASTYNKNSNIPGSSANTSTPTVSSYSPPQPSYSQPPYNQGGYSQGYTAPPPPPPPPPAYNYGSYGGYNPAPYTPPPPPTAQTYPQPSYNQYQQYAQQWNQYYQNQGQWPPYYGNYDYGSYSGNTQGGTSTQ

SEQ ID NO: 21 - protein, 142 aa, Homo sapiens
MSYMLPHLHNGWQVDQAILSEEDRVVVIRFGHDWDPTCMKMDEVLYSIAEKVKNFAVIYLVDITEVPDFNKMYELYDPCTVMFFFRNKHIMIDLGTGNNNKINWAMEDKQEMVDIIETVYRGARKGRGLVVSPKDYSTKYRY

SEQ ID NO: 22 - protein, 415 aa, Homo sapiens
MASRWWRWRRGCSWKPAARSPGPGSPGRAGPLGPSAAAEVRAQVHRRKGLDLSQIPYINLVKHLTSACPNVCRISRFHHTTPDSKTHSGEKYTDPFKLGWRDLKGLYEDIRKELLISTSELKEMSEYYFDGKGKAFRPIIVALMARACNIHHNNSRHVQASQRAIALIAEMIHTASLVHDDVIDDASSRRGKHTVNKIWGEKKAVLAGDLILSAASIALARIGNTTVISILTQVIEDLVRGEFLQLGSKENENERFAHYLEKTFKKTASLIANSCKAVSVLGCPDPVVHEIAYQYGKNVGIAFQLIDDVLDFTSCSDQMGKPTSADLKLGLATGPVLFACQQFPEMNAMIMRRFSLPGDVDRARQYVLQSDGVQQTTYLAQQYCHEAIREISKLRPSPERDALIQLSEIVLTRDK

SEQ ID NO: 23 - protein, 1802 aa, Homo sapiens
MAAAPTQIEAELYYLIARFLQSGPCNKSAQVLVQELEEHQLIPRRLDWEGKEHRRSFEDLVAANAHIPPDYLLKICERIGPLLDKEIPQSVPGVQTLLGVGRQSLLRDAKDCKSTLWNGSAFAALHRGRPPELPVNYVKPPNVVNITSARQLTGCSRFGHIFPSSAYQHIKMHKRILGHLSSVYCVAFDRSGRRIFTGSDDCLVKIWATDDGRLLATLRGHSAEISDMAVNYENTLIAAGSCDKVVRVWCLRTCAPVAVLQGHSASITSIQFCPSTKGTNRYLTSTGADGTICFWQWHVKTMKFRDRPVKFTERSRPGVQISCSSFSSGGMFITTGSTDHVIRIYYLGSEVPEKIAELESHTDKVVAVQFCNNGDSLRFVSGSRDGTARIWQYQQQEWKSIVLDMATKMTGNNLPSGEDKITKLKVTMVAWDRYDTTVITAVNNFLLKVWNSITGQLLHTLSGHDDEVFVLEAHPFDQRIILSAGHDGNIFIWDLDRGTKIRNYFNMIEGQGHGAVFDCKFSPDGNHFACTDSHGHLLLFGFGCSKYYEKIPDQMFFHTDYRPLIRDANNYVLDEQTQQAPHLMPPPFLVDVDGNPHPTKFQRLVPGRENCKDEQLIPQLGYVANGDGEVVEQVIGQQTNDQDESILDGIIRELQREQDLRLINEGDVPHLPVNRAYSVNGALRSPNMDISSSPNIRLRRHSSQIEGVRQMHNNAPRSQMATERDLMAWSRRVVVNELNNGVSRVQEECRTAKGDIEISLYTVEKKKKPSYTTQRNDYEPSCGRSLRRTQRKRQHTYQTRSNIEHNSQASCQNSGVQEDSDSSSEEDETVGTSDASVEDPVVEWQSESSSSDSSSEYSDWTADAGINLQPPKRQTRQTTRKICSSSDEENLKSLEERQKKPKQTRKKKGGLVSIAGEPNEEWFAPQWILDTIPRRSPFVPQMGDELIYFRQGHEAYVRAVRKSKIYSVNLQKQPWNKMDLREQEFVKIVGIKYEVGPPTLCCLKLAFLDPISGKMTGESFSIKYHDMPDVIDFLVLHQFYNEAKERNWQIGDRFRSIIDDAWWFGTVESQQPFQPEYPDSSFQCYSVHWDNNEREKMSPWDMEPIPEGTAFPDEVGAGVPVSQEELTALLYKPQEGEWGAHSRDEECERVIQGINHLLSLDFASPFAVPVDLSAYPLYCTVVAYPTDLNTIRRRLENRFYRRISALMWEVRYIEHNARTFNEPDSPIVKAAKIVTDVLLRFIGDQSCTDILDTYNKIKAEERNSTDAEEDTEIVDLDSDGPGTSSGRRVKCRGRRQSLKCNPDAWKKQCKELLSLIYEREDSEPFRQPADLLSYPGHQEQEGESSESVVPERQQDSSLSEDYQDVIDTPVDFSTVKETLEAGNYGSPLEFYKDVRQIFNNSKAYTSNKKSRIYSMMLRLSALFESHIKNIISEYKSAIQSQKRRRPRYRKRLRSSSSSLSSSGAPSPKGKQKQMKLQPKNDQNTSVSHARTSSPFSSPVSDAAEGLSLYLLDDEPDGPFSSSSFGGYSRSGNSHDPGKAKSFRNRVLPVKQDHSLDGPLTNGDGREPRTGIKRKLLSASEEDENMGGEDKEKKETKEKSHLSTSESGELGSSLSSESTCGSDSDSESTSRTDQDYVDGDHDYSKFIQTRPKRKLRKQHGNGKRNWKTRGTGGRGRWGRWGRWSRGGRGRGGRGRGSRGRGGGGTRGRGRGRGGRGASRGATRAKRARIADDEFDTMFSGRFSRLPRIKTRNQGRRTVLYNDDSDNDNFVSTEDPLNLGTSRSGRVRKMTEKARVSHLMGWNY

SEQ ID NO: 24 - protein, 291 aa, Homo sapiens
MDSRVSSPEKQDKENFVGVNNKRLGVCGWILFSLSFLLVIITFPISIWMCLKIIKEYERAVVFRLGRIQADKAKGPGLILVLPCIDVFVKVDLRTVTCNIPPQEILTRDSVTTQVDGVVYYRIYSAVSAVANVNDVHQATFLLAQTTLRNVLGTQTLSQILAGREEIAHSIQTLLDDATELWGIRVARVEIKDVRIPVQLQRSMAAEAEATREARAKVLAAEGEMNASKSLKSASMVLAESPIALQLRYLQTLSTVATEKNSTIVFPLPMNILEGIGGVSYDNHKKLPNKA

SEQ ID NO: 25 - protein, 442 aa, Homo sapiens
MPRARKGNTLRKGGQRRGGGARSSAQADSGSSDDEAASEARSTASECPSLLSTTAEDSLGGDVVDEQGQQEDLEEKLKEYVDCLTDKSAKTRQGALESLRLALASRLLPDFLLERRLTLADALEKCLKKGKGEEQALAAAVLGLLCVQLGPGPKGEELFHSLQPLLVSVLSDSTASPAARLHCASALGLGCYVAAADIQDLVSCLACLESVFSRFYGLGGSSTSPVVPASLHGLLSAALQAWALLLTICPSTQISHILDRQLPRLPQLLSSESVNLRIAAGETIALLFELARDLEEEFVYEDMEALCSVLRTLATDSNKYRAKADRRRQRSTFRAVLHSVEGGECEEEIVRFGFEVLYMDSWARHRIYAAFKEVLGSGMHHHLQNNELLRDIFGLGPVLLLDATALKACKVPRFEKHLYNAAAFKARTKARSRVRDKRADIL

SEQ ID NO: 26 - protein, 1285 aa, Homo sapiens
MERRWDLDLTYVTERILAAAFPARPDEQRHRGHLRELAHVLQSKHRDKYLLFNLSEKRHDLTRLNPKVQDFGWPELHAPPLDKLCSICKAMETWLSADPQHVVVLYCKGNKGKLGVIVSAYMHYSKISAGADQALATLTMRKFCEDKVATELQPSQRRYISYFSGLLSGSIRMNSSPLFLHYVLIPMLPAFEPGTGFQPFLKIYQSMQLVYTSGVYHIAGPGPQQLCISLEPALLLKGDVMVTCYHKGGRGTDRTLVFRVQFHTCTIHGPQLTFPKDQLDEAWTDERFPFQASVEFVFSSSPEKIKGSTPRNDPSVSVDYNTTEPAVRWDSYENFNQHHEDSVDGSLTHTRGPLDGSPYAQVQRPPRQTPPAPSPEPPPPPMLSVSSDSGHSSTLTTEPAAESPGRPPPTAAERQELDRLLGGCGVASGGRGAGRETAILDDEEQPTVGGGPHLGVYPGHRPGLSRHCSCRQGYREPCGVPNGGYYRPEGTLERRRLAYGGYEGSPQGYAEASMEKRRLCRSLSEGLYPYPPEMGKPATGDFGYRAPGYREVVILEDPGLPALYPCPACEEKLALPTAALYGLRLEREAGEGWASEAGKPLLHPVRPGHPLPLLLPACGHHHAPMPDYSCLKPPKAGEEGHEGCSYTMCPEGRYGHPGYPALVTYSYGGAVPSYCPAYGRVPHSCGSPGEGRGYPSPGAHSPRAGSISPGSPPYPQSRKLSYEIPTEEGGDRYPLPGHLASAGPLASAESLEPVSWREGPSGHSTLPRSPRDAPCSASSELSGPSTPLHTSSPVQGKESTRRQDTRSPTSAPTQRLSPGEALPPVSQAGTGKAPELPSGSGPEPLAPSPVSPTFPPSSPSDWPQERSPGGHSDGASPRSPVPTTLPGLRHAPWQGPRGPPDSPDGSPLTPVPSQMPWLVASPEPPQSSPTPAFPLAASYDTNGLSQPPLPEKRHLPGPGQQPGPWGPEQASSPARGISHHVTFAPLLSDNVPQTPEPPTQESQSNVKFVQDTSKFWYKPHLSRDQAIALLKDKDPGAFLIRDSHSFQGAYGLALKVATPPPSAQPWKGDPVEQLVRHFLIETGPKGVKIKGCPSEPYFGSLSALVSQHSISPISLPCCLRIPSKDPLEETPEAPVPTNMSTAADLLRQGAACSVLYLTSVETESLTGPQAVARASSAALSCSPRPTPAVVHFKVSAQGITLTDNQRKLFFRRHYPVNSITFSSTDPQDRRWTNPDGTTSKIFGFVAKKPGSPWENVCHLFAELDPDQPAGAIVTFITKVLLGQRK

SEQ ID NO: 27 - protein, 1191 aa, Homo sapiens
MPGTPGSLEMGLLTFRDVAIEFSPEEWQCLDTAQQNLYRNVMLENYRNLAFLGIALSKPDLITYLEQGKEPWNMKQHEMVDEPTGICPHFPQDFWPEQSMEDSFQKVLLRKYEKCGHENLQLRKGCKSVDECKVHKEGYNKLNQCLTTAQSKVFQCGKYLKVFYKFLNSNRHTIRHTGKKCFKCKKCVKSFCIRLHKTQHKCVYITEKSCKCKECEKTFHWSSTLTNHKEIHTEDKPYKCEECGKAFKQLSTLTTHKIICAKEKIYKCEECGKAFLWSSTLTRHKRIHTGEKPYKCEECGKAFSHSSTLAKHKRIHTGEKPYKCEECGKAFSHSSALAKHKRIHTGEKPYKCKECGKAFSNSSTLANHKITHTEEKPYKCKECDKTFKRLSTLTKHKIIHAGEKLYKCEECGKAFNRSSNLTIHKFIHTGEKPYKCEECGKAFNWSSSLTKHKRFHTREKPFKCKECGKGFIWSSTLTRHKRIHTGEKPYKCEECGKAFRQSSTLTKHKIIHTGEKPYKFEECGKAFRQSLTLNKHKIIHSREKPYKCKECGKAFKQFSTLTTHKIIHAGKKLYKCEECGKAFNHSSSLSTHKIIHTGEKSYKCEECGKAFLWSSTLRRHKRIHTGEKPYKCEECGKAFSHSSALAKHKRIHTGEKPYKCKECGKAFSNSSTLANHKITHTEEKPYKCKECDKTFKRLSTLTKHKIIHAGEKLYKCEECGKAFNRSSNLTIHKFIHTGEKPYKCEECGKAFNWSSSLTKHKRIHTREKPFKCKECGKAFIWSSTLTRHKRIHTGEKPYKCEECGKAFSRSSTLTKHKTIHTGEKPYKCKECGKAFKHSSALAKHKIIHAGEKLYKCEECGKAFNQSSNLTTHKIIHTKEKPSKSEECDKAFIWSSTLTEHKRIHTREKPYKCEECGKAFSQPSHLTTHKRMHTGEKPYKCEECGKAFSQSSTLTTHKIIHTGEKPYKCEECGKAFRKSSTLTEHKIIHTGEKPYKCEECGKAFSQSSTLTRHTRMHTGEKPYKCEECGKAFNRSSKLTTHKIIHTGEKPYKCEECGKAFISSSTLNGHKRIHTREKPYKCEECGKAFSQSSTLTRHKRLHTGEKPYKCGECGKAFKESSALTKHKIIHTGEKPYKCEKCCKAFNQSSILTNHKKIHTITPVIPLLWEAEAGGSRGQEMETILANTVKPLLY

SEQ ID NO: 28 - protein, 1925 aa, Homo sapiens
MENSHPPHHHHQQPPPQPGPSGERRNHHWRSYKLMIDPALKKGHHKLYRYDGQHFSLAMSSNRPVEIVEDPRVVGIWTKNKELELSVPKFKIDEFYVGPVPPKQVTFAKLNDNIRENFLRDMCKKYGEVEEVEILYNPKTKKHLGIAKVVFATVRGAKDAVQHLHSTSVMGNIIHVELDTKGETRMRFYELLVTGRYTPQTLPVGELDAVSPIVNETLQLSDALKRLKDGGLSAGCGSGSSSVTPNSGGTPFSQDTAYSSCRLDTPNSYGQGTPLTPRLGTPFSQDSSYSSRQPTPSYLFSQDPAVTFKARRHESKFTDAYNRRHEHHYVHNSPAVTAVAGATAAFRGSSDLPFGAVGGTGGSSGPPFKAQPQDSATFAHTPPPAQATPAPGFKSAFSPYQTPVAHFPPPPEEPTATAAFGARDSGEFRRAPAPPPLPPAEPLAKEKPGTPPGPPPPDTNSMELGGRPTFGWSPEPCDSPGTPTLESSPAGPEKPHDSLDSRIEMLLKEQRTKLLFLREPDSDTELQMEGSPISSSSSQLSPLAPFGTNSQPGFRGPTPPSSRPSSTGLEDISPTPLPDSDEDEELDLGLGPRPPPEPGPPDPAGLLSQTAEVALDLVGDRTPTSEKMDELQPRTGQVLGSRPSSDWLCRGATAEALSVFINCQMGRSRAPRPGQQSSGEDMEISDDEMPSAPITSADCPKPMVVTPGAAAVAAPSVDMSHVLGGQWGGMPMSFQMQTQVLSRLMTGQGACPYPPFMAAAAAAASAGLQFVNLPPYRGPFSLSNSGPGRGQHWPPLPKFDPSVPPPGYMPRQEDPHKATVDGVLLVVLKELKAIMKRDLNRKMVEVVAFRAFDEWWDKKERMAKASLTPVKSGEHKDEDRPKPKDRIASCLLESWGKGEGLGYEGLGLGIGLRGAIRLPSFKVKRKEPPDTTSSGDQKRLRPSTSVDEEDEESERERDRDMADTPCELAKRDPKGVGVRRRPARPLELDSGGEEDEKESLSASSSSSASSSSGSSTTSPSSSASDKEEEQESTEEEEEAEEEEEEEVPRSQLSSSSTSSTSDKDDDDDDSDDRDESENDDEDTALSEASEKDEGDSDEEETVSIVTSKAEATSSSESSESSEFESSSESSPSSSEDEEEVVAREEEEEEEEEEMVAEESMASAGPEDFEQDGEEAALAPGAPAVDSLGMEEEVDIETEAVAPEERPSMLDEPPLPVGVEEPADSREPPEEPGLSQEGAMLLSPEPPAKEVEARPPLSPERAPEHDLEVEPEPPMMLPLPLQPPLPPPRPPRPPSPPPEPETTDASHPSVPPEPLAEDHPPHTPGLCGSLAKSQSTETVPATPGGEPPLSGGSSGLSLSSPQVPGSPFSYPAPSPSLSSGGLPRTPGRDFSFTPTFSEPSGPLLLPVCPLPTGRRDERSGPLASPVLLETGLPLPLPLPLPLPLALPAVLRAQARAPTPLPPLLPAPLASCPPPMKRKPGRPRRSPPSMLSLDGPLVRPPAGAALGRELLLLPGQPQTPVFPSTHDPRTVTLDFRNAGIPAPPPPLPPQPPPPPPPPPVEPTKLPFKELDNQWPSEAIPPGPRGRDEVTEEYMELAKSRGPWRRPPKKRHEDLVPPAGSPELSPPQPLFRPRSEFEEMTILYDIWNGGIDEEDIRFLCVTYERLLQQDNGMDWLNDTLWVYHPSTSLSSAKKKKRDDGIREHVTGCARSEGFYTIDKKDKLRYLNSSRASTDEPPADTQGMSIPAQPHASTRAGSERRSEQRRLLSSFTGSCDSDLLKFNQLKFRKKKLKFCKSHIHDWGLFAMEPIAADEMVIEYVGQNIRQVIADMREKRYEDEGIGSSYMFRVDHDTIIDATKCGNFARFINHSCNPNCYAKVITVESQKKIVIYSKQHINVNEEITYDYKFPIEDVKIPCLCGSENCRGTLN

SEQ ID NO: 29 - protein, 183 aa, Homo sapiens
MTTASTSQVRQNYHQDSEAAINRQINLELYASYVYLSMSYYFDRDDVALKNFAKYFLHQSHEEREHAEKLMKLQNQRGGRIFLQDIKKPDCDDWESGLNAMECALHLEKNVNQSLLELHKLATDKNDPHLCDFIETHYLNEQVKAIKELGDHVTNLRKMGAPESGLAEYLFDKHTLGDSDNES

SEQ ID NO: 30 - protein, 312 aa, Homo sapiens
MEEECRVLSIQSHVIRGYVGNRAATFPLQVLGFEIDAVNSVQFSNHTGYAHWKGQVLNSDELQELYEGLRLNNMNKYDYVLTGYTRDKSFLAMVVDIVQELKQQNPRLVYVCDPVLGDKWDGEGSMYVPEDLLPVYKEKVVPLADIITPNQFEAELLSGRKIHSQEEALRVMDMLHSMGPDTVVITSSDLPSPQGSNYLIVLGSQRRRNPAGSVVMERIRMDIRKVDAVFVGTGDLFAAMLLAWTHKHPNNLKVACEKTVSTLHHVLQRTIQCAKAQAGEGVRPSPMQLELRMVQSKRDIEDPEIVVQATVL

SEQ ID NO: 31 - protein, 247 aa, Homo sapiens
MNLLLILTFVAAAVAAPFDDDDKIVGGYICEENSVPYQVSLNSGYHFCGGSLISEQWVVSAGHCYKSRIQVRLGEHNIEVLEGNEQFINAAKIIRHPKYNSRTLDNDILLIKLSSPAVINSRVSAISLPTAPPAAGTESLISGWGNTLSSGADYPDELQCLDAPVLSQAECEASYPGKITNNMFCVGFLEGGKDSCQGDSGGPVVSNGELQGIVSWGYGCAQKNRPGVYTKVYNYVDWIKDTIAANS

SEQ ID NO: 32 - protein, 811 aa, Homo sapiens
MEAARALRLLLVVCGCLALPPLAEPVCPERCDCQHPQHLLCTNRGLRVVPKTSSLPSPHDVLTYSLGGNFITNITAFDFHRLGQLRRLDLQYNQIRSLHPKTFEKLSRLEELYLGNNLLQALAPGTLAPLRKLRILYANGNEISRLSRGSFEGLESLVKLRLDGNALGALPDAVFAPLGNLLYLHLESNRIRFLGKNAFAQLGKLRFLNLSANELQPSLRHAATFAPLRSLSSLILSANSLQHLGPRIFQHLPRLGLLSLRGNQLTHLAPEAFWGLEALRELRLEGNRLSQLPTALLEPLHSLEALDLSGNELSALHPATFGHLGRLRELSLRNNALSALSGDIFAASPALYRLDLDGNGWTCDCRLRGLKRWMGDWHSQGRLLTVFVQCRHPPALRGKYLDYLDDQQLQNGSCADPSPSASLTADRRRQPLPTAAGEEMTPPAGLAEELPPQPQLQQQGRFLAGVAWDGAARELVGNRSALRLSRRGPGLQQPSPSVAAAAGPAPQSLDLHKKPQRGRPTRADPALAEPTPTASPGSAPSPAGDPWQRATKHRLGTEHQERAAQSDGGAGLPPLVSDPCDFNKFILCNLTVEAVGADSASVRWAVREHRSPRPLGGARFRLLFDRFGQQPKFHRFVYLPESSDSATLRELRGDTPYLVCVEGVLGGRVCPVAPRDHCAGLVTLPEAGSRGGVDYQLLTLALLTVNALLVLLALAAWASRWLRRKLRARRKGGAPVHVRHMYSTRRPLRSMGTGVSADFSGFQSHRPRTTVCALSEADLIEFPCDRFMDSAGGGAGGSLRREDRLLQRFAD

SEQ ID NO: 33 - protein, 931 aa, Homo sapiens
MLLFFTLGLLIHFVFFASIFDIYFTSPLVHGMTPQFTPLPPPARRLVLFVADGLRADALYELDENGNSRAPFIRNIIMHEGSWGISHTRVPTESRPGHVALIAGFYEDVSAVAKGWKENPVEFDSLFNESKYTWSWGSPDILPMFAKGASGDHVYTYSYDAKREDFGAQDATKLDTWVFDNVKDFFHHARNNQSLFSKINEEKIVFFLHLLGIDTNGHAHRPSSRDYKHNIKKVDDGVKEIVSMFNHFYGNDGKTTFIFTSDHGMTDWGSHGAGHPSETLTPLVTWGAGIKYPQRVSAQQFDDAFLKEWRLENWKRLDVNQADIAPLMTSLIGVPFPLNSVGILPVDYLNNTDLFKAESMFTNAVQILEQFKVKMTQKKEVTLPFLFTPFKLLSDSKQFNILRKARSYIKHRKFDEVVSLCKELIHLALKGLSYYHTYDRFFLGVNVVIGFVGWISYASLLIIKSHSNLIKGVSKEVKKPSHLLPCSFVAIGILVAFFLLIQACPWTYYVYGLLPLPIWYAVLREFQVIQDLVVSVLTYPLSHFVGYLLAFTLGIEVLVLSFFYRYMLTAGLTAFAAWPFLTRLWTRAKMTSLSWTFFSLLLAVFPLMPVVGRKPDISLVMGAGLLVLLLSLCVVTSLMKRKDSFIKEELLVHLLQVLSTVLSMYVVYSTQSSLLRKQGLPLMNQIISWATLASSLVVPLLSSPVLFQRLFSILLSLMSTYLLLSTGYEALFPLVLSCLMFVWINIEQETLQQSGVCCKQKLTSIQFSYNTDITQFRQLYLDDIRRAFFLVFFLVTAFFGTGNIASINSFDLASVYCFLTVFSPFMMGALMMWKILIPFVLVMCAFEAVQLTTQLSSKSLFLIVLVISDIMALHFFFLVKDYGSWLDIGTSISHYVIVMSMTIFLVFLNGLAQLLTTKKLRLCGKPKSHFM

SEQ ID NO: 34 - protein, 559 aa, Homo sapiens
MSATSVDTQRTKGQDNKVQNGSLHQKDTVHDNDFEPYLTGQSNQSNSYPSMSDPYLSSYYPPSIGFPYSLNEAPWSTAGDPPIPYLTTYGQLSNGDHHFMHDAVFGQPGGLGNNIYQHRFNFFPENPAFSAWGTSGSQGQQTQSSAYGSSYTYPPSSLGGTVVDGQPGFHSDTLSKAPGMNSLEQGMVGLKIGDVSSSAVKTVGSVVSSVALTGVLSGNGGTNVNMPVSKPTSWAAIASKPAKPQPKMKTKSGPVMGGGLPPPPIKHNMDIGTWDNKGPVPKAPVPQQAPSPQAAPQPQQVAQPLPAQPPALAQPQYQSPQQPPQTRWVAPRNRNAAFGQSGGAGSDSNSPGNVQPNSAPSVESHPVLEKLKAAHSYNPKEFEWNLKSGRVFIIKSYSEDDIHRSIKYSIWCSTEHGNKRLDSAFRCMSSKGPVYLLFSVNGSGHFCGVAEMKSPVDYGTSAGVWSQDKWKGKFDVQWIFVKDVPNNQLRHIRLENNDNKPVTNSRDTQEVPLEKAKQVLKIISSYKHTTSIFDDFAHYEKRQEEEEVVRKERQSRNKQ

SEQ ID NO: 35 - protein, 538 aa, Homo sapiens
MNLELLESFGQNYPEEADGTLDCISMALTCTFNRWGTLLAVGCNDGRIVIWDFLTRGIAKIISAHIHPVCSLCWSRDGHKLVSASTDNIVSQWDVLSGDCDQRFRFPSPILKVQYHPRDQNKVLVCPMKSAPVMLTLSDSKHVVLPVDDDSDLNVVASFDRRGEYIYTGNAKGKILVLKTDSQDLVASFRVTTGTSNTTAIKSIEFARKGSCFLINTADRIIRVYDGREILTCGRDGEPEPMQKLQDLVNRTPWKKCCFSGDGEYIVAGSARQHALYIWEKSIGNLVKILHGTRGELLLDVAWHPVRPIIASISSGVVSIWAQNQVENWSAFAPDFKELDENVEYEERESEFDIEDEDKSEPEQTGADAAEDEEVDVTSVDPIAAFCSSDEELEDSKALLYLPIAPEVEDPEENPYGPPPDAVQTSLMDEGASSEKKRQSSADGSQPPKKKPKTTNIELQGVPNDEVHPLLGVKGDGKSKKKQAGRPKGSKGKEKDSPFKPKLYKGDRGLPLEGSAKGKVQAELSQPLTAGGAISELL

SEQ ID NO: 36 - protein, 415 aa, Homo sapiens
MMLGPEGGEGFVVKLRGLPWSCSVEDVQNFLSDCTIHDGAAGVHFIYTREGRQSGEAFVELGSEDDVKMALKKDRESMGHRYIEVFKSHRTEMDWVLKHSGPNSADSANDGFVRLRGLPFGCTKEEIVQFFSGLEIVPNGITLPVDPEGKITGEAFVQFASQELAEKALGKHKERIGHRYIEVFKSSQEEVRSYSDPPLKFMSVQRPGPYDRPGTARRYIGIVKQAGLERMRPGAYSTGYGGYEEYSGLSDGYGFTTDLFGRDLSYCLSGMYDHRYGDSEFTVQSTTGHCVHMRGLPYKATENDIYNFFSPLNPVRVHIEIGPDGRVTGEADVEFATHEEAVAAMSKDRANMQHRYIELFLNSTTGASNGAYSSQVMQGMGVSAAQATYSGLESQSVSGCYGAGYSGQNSMGGYD

SEQ ID NO: 37 - protein, 288 aa, Homo sapiens [sequence omitted]

SEQ ID NO: 38 - protein, 1749 aa, Homo sapiens
MADEEAGGTERMEISAELPQTPQRLASWWDQQVDFYTAFLHHLAQLVPEIYFAEMDPDLEKQEESVQMSIFTPLEWYLFGEDPDICLEKLKHSGAFQLCGRVFKSGETTYSCRDCAIDPTCVLCMDCFQDSVHKNHRYKMHTSTGGGFCDCGDTEAWKTGPFCVNHEPGRAGTIKENSRCPLNEEVIVQARKIFPSVIKYVVEMTIWEEEKELPPELQIREKNERYYCVLFNDEHHSYDHVIYSLQRALDCELAEAQLHTTAIDKEGRRAVKAGAYAACQEAKEDIKSHSENVSQHPLHVEVLHSEIMAHQKFALRLGSWMNKIMSYSSDFRQIFCQACLREEPDSENPCLISRLMLWDAKLYKGARKILHELIFSSFFMEMEYKKLFAMEFVKYYKQLQKEYISDDHDRSISITALSVQMFTVPTLARHLIEEQNVISVITETLLEVLPEYLDRNNKFNFQGYSQDKLGRVYAVICDLKYILISKPTIWTERLRMQFLEGFRSFLKILTCMQGMEEIRRQVGQHIEVDPDWEAAIAIQMQLKNILLMFQEWCACDEELLLVAYKECHKAVMRCSTSFISSSKTVVQSCGHSLETKSYRVSEDLVSIHLPLSRTLAGLHVRLSRLGAVSRLHEFVSFEDFQVEVLVEYPLRCLVLVAQVVAEMWRRNGLSLISQVFYYQDVKCREEMYDKDIIMLQIGASLMDPNKFLLLVLQRYELAEAFNKTISTKDQDLIKQYNTLIEEMLQVLIYIVGERYVPGVGNVTKEEVTMREIIHLLCIEPMPHSAIAKNLPENENNETGLENVINKVATFKKPGVSGHGVYELKDESLKDFNMYFYHYSKTQHSKAEHMQKKRRKQENKDEALPPPPPPEFCPAFSKVINLLNCDIMMYILRTVFERAIDTDSNLWTEGMLQMAFHILALGLLEEKQQLQKAPEEEVTFDFYHKASRLGSSAMNIQMLLEKLKGIPQLEGQKDMITWILQMFDTVKRLREKSCLIVATTSGSESIKNDEITHDKEKAERKRKAEAARLHRQKIMAQMSALQKNFIETHKLMYDNTSEMPGKEDSIMEEESTPAVSDYSRIALGPKRGPSVTEKEVLTCILCQEEQEVKIENNAMVLSACVQKSTALTQHRGKPIELSGEALDPLFMDPDLAYGTYTGSCGHVMHAVCWQKYFEAVQLSSQQRIHVDLFDLESGEYLCPLCKSLCNTVIPIIPLQPQKINSENADALAQLLTLARWIQTVLARISGYNIRHAKGENPIPIFFNQGMGDSTLEFHSILSFGVESSIKYSNSIKEMVILFATTIYRIGLKVPPDERDPRVPMLTWSTCAFTIQAIENLLGDEGKPLFGALQNRQHNGLKALMQFAVAQRITCPQVLIQKHLVRLLSVVLPNIKSEDTPCLLSIDLFHVLVGAVLAFPSLYWDDPVDLQPSSVSSSYNHLYLFHLITMAHMLQILLTVDTGLPLAQVQEDSEEAHSASSFFAEISQYTSGSIGCDIPGWYLWVSLKNGITPYLRCAALFFHYLLGVTPPEELHTNSAEGEYSALCSYLSLPTNLFLLFQEYWDTVRPLLQRWCADPALLNCLKQKNTVVRYPRKRNSLIELPDDYSCLLNQASHFRCPRSADDERKHPVLCLFCGAILCSQNICCQEIVNGEEVGACIFHALHCGAGVCIFLKIRECRVVLVEGKARGCAYPAPYLDEYGETDPGLKRGNPLHLSRERYRKLHLVWQQHCIIEEIARSQETNQMLFGFNWQLL

SEQ ID NO: 39 - protein, 391 aa, Homo sapiens
MSGPVPSRARVYTDVNTHRPREYWDYESHVVEWGNQDDYQLVRKLGRGKYSEVFEAINITNNEKVVVKILKPVKKKKIKREIKILENLRGGPNIITLADIVKDPVSRTPALVFEHVNNTDFKQLYQTLTDYDIRFYMYEILKALDYCHSMGIMHRDVKPHNVMIDHEHRKLRLIDWGLAEFYHPGQEYNVRVASRYFKGPELLVDYQMYDYSLDMWSLGCMLASMIFRKEPFFHGHDNYDQLVRIAKVLGTEDLYDYIDKYNIELDPRFNDILGRHSRKRWERFVHSENQHLVSPEALDFLDKLLRYDHQSRLTAREAMEHPYFYTVVKDQARMGSSSMPGGSTPVSSANMMSGISSVPTPSPLGPLAGSPVIAAANPLGMPVPAAAGAQQ

SEQ ID NO: 40 - protein, 215 aa, Homo sapiens
MSSSEEVSWISWFCGLRGNEFFCEVDEDYIQDKFNLTGLNEQVPHYRQALDMILDLEPDEELEDNPNQSDLIEQAAEMLYGLIHARYILTNRGIAQMLEKYQQGDFGYCPRVYCENQPMLPIGLSDIPGEAMVKLYCPKCMDVYTPKSSRHHHTDGAYFGTGFPHMLFMVHPEYRPKRPANQFVPRLYGFKIHPMAYQLQLQAASNFKSPVKTIR

SEQ ID NO: 41 - protein, 445 aa, Homo sapiens
MALVDKHKVKRQRLDRICEGIRPQIMNGPLHPRPLVALLDGRDCTVEMPILKDLATVAFCDAQSTQEIHEKVLNEAVGAMMYHTITLTREDLEKFKALRVIVRIGSGYDNVDIKAAGELGIAVCNIPSAAVEETADSTICHILNLYRRNTWLYQALREGTRVQSVEQIREVASGAARIRGETLGLIGFGRTGQAVAVRAKAFGFSVIFYDPYLQDGIERSLGVQRVYTLQDLLYQSDCVSLHCNLNEHNHHLINDFTIKQMRQGAFLVNAARGGLVDEKALAQALKEGRIRGAALDVHESEPFSFAQGPLKDAPNLICTPHTAWYSEQASLEMREAAATEIRRAITGRIPESLRNCVNKEFFVTSAPWSVIDQQAIHPELNGATYRYPPGIVGVAPGGLPAAMEGIIPGGIPVTHNLPTVAHPSQAPSPNQPTKHGDNREHPNEQ

SEQ ID NO: 42 - protein, 1851 aa, Homo sapiens
MEKVVDIPCQAKGVPPPSITWYKDAAVVEVEKLTRFRQRNDGGLQISGLVPDDTGMFQCFARNAAGEVQTSTYLAVTSIAPNITRGPLDSTVIDGMSVVLACETSGAPRPAITWQKGERILASGSVQLPRFTPLESGSLLISPTHISDAGTYTCLATNSRGVDEASADLVVWARTRITKPPQDQSVIKGTQASMVCGVTHDPRVTIRYIWEKDGATLGTESHPRIRLDRNGSLHISQTWSGDIGTYTCRVISAGGNDSRSAHLRVRQLPHAPEHPVATLSTVERRAINLTWTKPFDGNSPLIRYILEMSENNAPWTVLLASVDPKATSVTVKGLVPARSYQFRLCAVNDVGKGQFSKDTERVSLPEEPPTAPPQNVIASGRTNQSIMIQWQPPPESHQNGILKGYIIRYCLAGLPVGYQFKNITDADVNNLLLEDLIIWTNYEIEVAAYNSAGLGVYSSKVTEWTLQGVPTVPPGNVHAEATNSTTIRFTWNAPSPQFINGINQGYKLIAWEPEQEEEVTMVTARPNFQDSIHVGFVSGLKKFTEYFTSVLCFTTPGDGPRSTPQLVRTHEDVPGPVGHLSFSEILDTSLKVSWQEPGEKNGILTGYRISWEEYNRTNTRVTHYLPNVTLEYRVTGLTALTTYTIEVAAMTSKGQGQVSASTISSGVPPELPGPPTNLGISNIGPRSVTLQFRPGYDGKTSISRWLVEAQVGVVGEGEEWLLIHQLSNEPDARSMEVPDLNPFTCYSFRMRQVNIVGTSPPSQPSRKIQTLQAPPDMAPANVSLRTASETSLWLRWMPLPEMEYNGNPESVGYKIKYSRSDGHGKTLSHVVQDRVERDYTIEDLEEWTEYRVQVQAFNAIGSGPWSQTVVGRTRESVPSSGPTNVSALATTSSSMLVRWSEVPEADRNGLVLGYKVMYKEKDSDTQPRFWLVEGNSSRSAQLTGLGKYVLYEVQVLAFTRIGDGSPSHPPILERTLDDVPGPPMGILFPEVRTTSVRLIWQPPAAPNGIILAYQITHRLNTTTANTATVEVLAPSARQYTATGLKPESVYLFRITAQTRKGWGEAAEALVVTTEKRDRPQPPSRPMVQQEDVRARSVLLSWEPGSDGLSPVRYYTIQTRELPSGRWALHSASVSHNASSFIVDRLKPFTSYKFRVKATNDIGDSEFSEESESLTTLQAAPDEAPTILSVTPHTTTSVLIRWQPPAEDKINGILLGFRIRYRELLYEGLRGFTLRGINNPGATWAELTSMYSMRNLSRPSLTQYELDNLNKHRRYEIRMSVYNAVGEGPSSPPQEVFVGEAVPTAAPRNVVVHGATATQLDVTWEPPPLDSQNGDIQGYKIYFWEAQRGNLTERVKTLFLAENSVKLKNLTGYTAYMVSVAAFNAAGDGPRSTPTQGQTQQAAPSAPSSVKFSELTTTSVNVSWEAPQFPNGILEGYRLVYEPCSPVDGVSKIVTVDVKGNSPLWLKVKDLAEGVTYRFRIRAKTFTYGPEIEANVTTGPGEGAPGPPGVPIIVRYSSAIAIHWSSGDPGKGPITRYVIEARPSDEGLWDILIKDIPKEVSSYTFSMDILKPGVSYDFRVIAVNDYGFGTPSSPSQSVPAQKANPFYEEWWFLVVIALVGLIFILLLVFVLIIRGQSKKYAKKTDSGNSAKSGALGHSEMMSLDESSFPALELNNRRLSVKNSFCRKNGLYTRSPPRPSPGSLHYSDEDVTKYNDLIPAESSSLTEKPSEISDSQGSDSEYEVDSNHQKAHSFVNHYISDPTYYNSWRRQQKGISRAQAYSYTESDSGEPDHTTVTNSTSTQQGSLFRPKASRTPTPQNPPNPPSQQSTLYRPPSSLAPGSRAPIAGFSSFV

SEQ ID NO: 43 - protein, 1047 aa, Homo sapiens
MAVTLDKDAYYRRVKRLYSNWRKGEDEYANVDAIVVSVGVDEEIVYAKSTALQTWLFGYELTDTIMVFCDDKIIFMASKKKVEFLKQIANTKGNENANGAPAITLLIREKNESNKSSFDKMIEAIKESKNGKKIGVFSKDKFPGEFMKSWNDCLNKEGFDKIDISAVVAYTIAVKEDGELNLMKKAASITSEVFNKFFKERVMEIVDADEKVRHSKLAESVEKAIEEKKYLAGADPSTVEMCYPPIIQSGGNYNLKFSVVSDKNHMHFGAITCAMGIRFKSYCSNLVRTLMVDPSQEVQENYNFLLQLQEELLKELRHGVKICDVYNAVMDVVKKQKPELLNKITKNLGFGMGIEFREGSLVINSKNQYKLKKGMVFSINLGFSDLTNKEGKKPEEKTYALFIGDTVLVDEDGPATVLTSVKKKVKNVGIFLKNEDEEEEEEEKDEAEDLLGRGSRAALLTERTRNEMTAEEKRRAHQKELAAQLNEEAKRRLTEQKGEQQIQKARKSNVSYKNPSLMPKEPHIREMKIYIDKKYETVIMPVFGIATPFHIATIKNISMSVEGDYTYLRINFYCPGSALGRNEGNIFPNPEATFVKEITYRASNIKAPGEQTVPALNLQNAFRIIKEVQKRYKTREAEEKEKEGIVKQDSLVINLNRSNPKLKDLYIRPNIAQKRMQGSLEAHVNGFRFTSVRGDKVDILYNNIKHALFQPCDGEMIIVLHFHLKNAIMFGKKRHTDVQFYTEVGEITTDLGKHQHMHDRDDLYAEQMEREMRHKLKTAFKNFIEKVEALTKEELEFEVPFRDLGFNGAPYRSTCLLQPTSSALVNATEWPPFVVTLDEVELIHFERVQFHLKNFDMVIVYKDYSKKVTMINAIPVASLDPIKEWLNSCDLKYTEGVQSLNWTKIMKTIVDDPEGFFEQGGWSFLEPEGEGSDAEEGDSESEIEDETFNPSEDDYEEEEEDSDEDYSSEAEESDYSKESLGSEEESGKDWDELEEEARKADRESRYEEEEEQSRSMSRKRKASVHSSGRGSNRGSRHSSAPPKKKRK

SEQ ID NO: 44 - protein, 611 aa, Homo sapiens
MAASAKKKNKKGKTISLTDFLAEDGGTGGGSTYVSKPVSWADETDDLEGDVSTTWHSNDDDVYRAPPIDRSILPTAPRAAREPNIDRSRLPKSPPYTAFLGNLPYDVTEESIKEFFRGLNISAVRLPREPSNPERLKGFGYAEFEDLDSLLSALSLNEESLGNRRIRVDVADQAQDKDRDDRSFGRDRNRDSDKTDTDWRARPATDSFDDYPPRRGDDSFGDKYRDRYDSDRYRDGYRDGYRDGPRRDMDRYGGRDRYDDRGSRDYDRGYDSRIGSGRRAFGSGYRRDDDYRGGGDRYEDRYDRRDDRSWSSRDDYSRDDYRRDDRGPPQRPKLNLKPRSTPKEDDSSASTSQSTRAASIFGGAKPVDTAAREREVEERLQKEQEKLQRQLDEPKLERRPRERHPSWRSEETQERERSRTGSESSQTGTSTTSSRNARRRESEKSLENETLNKEEDCHSPTSKPPKPDQPLKVMPAPPPKENAWVKRSSNPPARSQSSDTEQQSPTSGGGKVAPAQPSEEGPGRKDENKVDGMNAPKGQTGNSSRGPGDGGNRDHWKESDRKDGKKDQDSRSAPEPKKPEENPASKFSSASKYAALSVDGEDENEGEDYAE

SEQ ID NO: 45 - protein, 2004 aa, Homo sapiens
MVKLANPLYTEWILEAIKKVKKQKQRPSEERICNAVSSSHGLDRKTVLEQLELSVKDGTILKVSNKGLNSYKDPDNPGRIALPKPRNHGKLDNKQNVDWNKLIKRAVEGLAESGGSTLKSIERFLKGQKDVSALFGGSAASGFHQQLRLAIKRAIGHGRLLKDGPLYRLNTKATNVDGKESCESLSCLPPVSLLPHEKDKPVAEPIPICSFCLGTKEQNREKKPEELISCADCGNSGHPSCLKFSPELTVRVKALRWQCIECKTCSSCRDQGKNADNMLFCDSCDRGFHMECCDPPLTRMPKGMWICQICRPRKKGRKLLQKKAAQIKRRYTNPIGRPKNRLKKQNTVSKGPFSKVRTGPGRGRKRKITLSSQSASSSSEEGYLERIDGLDFCRDSNVSLRFNKKTKGLIDGLTKFFTPSPDGRKARGEVVDYSEQYRIRKRGNRKSSTSDWPTDNQDGWDGKQENEERLFGSQEIMTEKDMELFRDIQEQALQKVGVTGPPDPQVRCPSVIEFGKYEIHTWYSSPYPQEYSRLPKLYLCEFCLKYMKSRTILQQHMKKCGWFHPPANEIYRKNNISVFEVDGNVSTIYCQNLCLLAKLFLDHKTLYYDVEPFLFYVLTQNDVKGCHLVGYFSKEKHCQQKYNVSCIMILPQYQRKGYGRFLIDFSYLLSKREGQAGSPEKPLSDLGRLSYMAYWKSVILECLYHQNDKQISIKKLSKLTGICPQDITSTLHHLRMLDFRSDQFVIIRREKLIQDHMAKLQLNLRPVDVDPECLRWTPVIVSNSVVSEEEEEEAEEGENEEPQCQERELEISVGKSVSHENKEQDSYSVESEKKPEVMAPVSSTRLSKQVLPHDSLPANSQPSRRGRWGRKNRKTQERFGDKDSKLLLEETSSAPQEQYGECGEKSEATQEQYTESEEQLVASEEQPSQDGKPDLPKRRLSEGVEPWRGQLKKSPEALKCRLTEGSERLPRRYSEGDRAVLRGFSESSEEEEEPESPRSSSPPILTKPTLKRKKPFLHRRRRVRKRKHHNSSVVTETISETTEVLDEPFEDSDSERPMPRLEPTFEIDEEEEEEDENELFPREYFRRLSSQDVLRCQSSSKRKSKDEEEDEESDDADDTPILKPVSLLRKRDVKNSPLEPDTSTPLKKKKGWPKGKSRKPIHWKKRPGRKPGFKLSREIMPVSTQACVIEPIVSIPKAGRKPKIQESEETVEPKEDMPLPEERKEEEEMQAEAEEAEEGEEEDAASSEVPAASPADSSNSPETETKEPEVEEEEEKPRVSEEQRQSEEEQQELEEPEPEEEEDAAAETAQNDDHDADDEDDGHLESTKKKELEEQPTREDVKEEPGVQESFLDANMQKSREKIKDKEETELDSEEEQPSHDTSVVSEQMAGSEDDHEEDSHTKEELIELKEEEEIPHSELDLETVQAVQSLTQEESSEHEGAYQDCEETLAACQTLQSYTQADEDPQMSMVEDCHASEHNSPISSVQSHPSQSVRSVSSPNVPALESGYTQISPEQGSLSAPSMQNMETSPMMDVPSVSDHSQQVVDSGFSDLGSIESTTENYENPSSYDSTMGGSICGNSSSQSSCSYGGLSSSSSLTQSSCVVTQQMASMGSSCSMMQQSSVQPAANCSIKSPQSCVVERPPSNQQQQPPPPPPQQPQPPPPQPQPAPQPPPPQQQPQQQPQPQPQQPPPPPPPQQQPPLSQCSMNNSFTPAPMIMEIPESGSTGNISIYERIPGDFGAGSYSQPSATFSLAKLQQLTNTIMDPHAMPYSHSPAVTSYATSVSLSNTGLAQLAPSHPLAGTPQAQATMTPPPNLASTTMNLTSPLLQCNMSATNIGIPHTQRLQGQMPVKGHISIRSKSAPLPSAAAHQQQLYGRSPSAVAMQAGPRALAVQRGMNMGVNLMPTPAYNVNSMNMNTLNAMNSYRMTQPMMNSSYHSNPAYMNQTAQYPMQMQMGMMGSQAYTQQPMQPNPHGNMMYTGPSHHSYMNAAGVPKQSLNGPYMRR

SEQ ID NO: 46 - protein, 502 aa, Homo sapiens
MRCSPGGVWLALAASLLHVSLQGEFQRKLYKELVKNYNPLERPVANDSQPLTVYFSLSLLQIMDVDEKNQVLTTNIWLQMSWTDHYLQWNVSEYPGVKTVRFPDGQIWKPDILLYNSADERFDATFHTNVLVNSSGHCQYLPPGIFKSSCYIDVRWFPFDVQHCKLKFGSWSYGGWSLDLQMQEADISGYIPNGEWDLVGIPGKRSERFYECCKEPYPDVTFTVTMRRRTLYYGLNLLIPCVLISALALLVFLLPADSGEKISLGITVLLSLTVFMLLVAEIMPATSDSVPLIAQYFASTMIIVGLSVVVTVIVLQYHHHDPDGGKMPKWTRVILLNWCAWFLRMKRPGEDKVRPACQHKQRRCSLASVEMSAVAPPPASNGNLLYIGFRGLDGVHCVPTPDSGVVCGRMACSPTHDEHLLHGGQPPEGDPDLAKILEEVRYIANRFRCQDESEAVCSEWKFAACVVDRLCLMAFSVFTIICTIGILMSAPNFVEAVSKDFA

SEQ ID NO: 47 - protein, 1132 aa, Homo sapiens
MGMACLTMTEMEGTSTSSIYQNGDISGNANSMKQIDPVLQVYLYHSLGKSEADYLTFPSGEYVAEEICIAASKACGITPVYHNMFALMSETERIWYPPNHVFHIDESTRHNVLYRIRFYFPRWYCSGSNRAYRHGISRGAEAPLLDDFVMSYLFAQWRHDFVHGWIKVPVTHETQEECLGMAVLDMMRIAKENDQTPLAIYNSISYKTFLPKCIRAKIQDYHILTRKRIRYRFRRFIQQFSQCKATARNLKLKYLINLETLQSAFYTEKFEVKEPGSGPSGEEIFATIIITGNGGIQWSRGKHKESETLTEQDLQLYCDFPNIIDVSIKQANQEGSNESRVVTIHKQDGKNLEIELSSLREALSFVSLIDGYYRLTADAHHYLCKEVAPPAVLENIQSNCHGPISMDFAISKLKKAGNQTGLYVLRCSPKDFNKYFLTFAVERENVIEYKHCLITKNENEEYNLSGTKKNFSSLKDLLNCYQMETVRSDNIIFQFTKCCPPKPKDKSNLLVFRTNGVSDVPTSPTLQRPTHMNQMVFHKIRNEDLIFNESLGQGTFTKIFKGVRREVGDYGQLHETEVLLKVLDKAHRNYSESFFEAASMMSKLSHKHLVLNYGVCVCGDENILVQEFVKFGSLDTYLKKNKNCINILWKLEVAKQLAWAMHFLEENTLIHGNVCAKNILLIREEDRKTGNPPFIKLSDPGISITVLPKDILQERIPWVPPECIENPKNLNLATDKWSFGTTLWEICSGGDKPLSALDSQRKLQFYEDRHQLPAPKWAELANLINNCMDYEPDFRPSFRAIIRDLNSLFTPDYELLTENDMLPNMRIGALGFSGAFEDRDPTQFEERHLKFLQQLGKGNFGSVEMCRYDPLQDNTGEVVAVKKLQHSTEEHLRDFEREIEILKSLQHDNIVKYKGVCYSAGRRNLKLIMEYLPYGSLRDYLQKHKERIDHIKLLQYTSQICKGMEYLGTKRYIHRDLATRNILVENENRVKIGDFGLTKVLPQDKEYYKVKEPGESPIFWYAPESLTESKFSVASDVWSFGVVLYELFTYIEKSKSPPAEFMRMIGNDKQGQMIVFHLIELLKNNGRLPRPDGCPDEIYMIMTECWNNNVNQRPSFRDLALRVDQIRDNMAG

SEQ ID NO: 48 - protein, 416 aa, Homo sapiens
MATEPPSPLRVEAPGPPEMRTSPAIESTPEGTPQPAGGRLRFLNGCVPLSHQVAGHMYGKDKVGILQHPDGTVLKQLQPPPRGPRELEFYNMVYAADCFDGVLLELRKYLPKYYGIWSPPTAPNDLYLKLEDVTHKFNKPCIMDVKIGQKSYDPFASSEKIQQQVSKYPLMEEIGFLVLGMRVYHVHSDSYETENQHYGRSLTKETIKDGVSRFFHNGYCLRKDAVAASIQKIEKILQWFENQKQLNFYASSLLFVYEGSSQPTTTKLNDRTLAEKFLSKGQLSDTEVLEYNNNFHVLSSTANGKIESSVGKSLSKMYARHRKIYTKKHHSQTSLKVENLEQDNGWKSMSQEHLNGNVLSQLEKVFYHLPTGCQEIAEVEVRMIDFAHVFPSNTIDEGYVYGLKHLISVLRSILDN

SEQ ID NO: 49 - protein, 2602 aa, Homo sapiens
MPVTEKDLAEDAPWKKIQQNTFTRWCNEHLKCVNKRIGNLQTDLSDGLRLIALLEVLSQKRMYRKYHQRPTFRQMQLENVSVALEFLDRESIKLVSIDSKAIVDGNLKLILGLVWTLILHYSISMPVWEDEGDDDAKKQTPKQRLLGWIQNKIPYLPITNFNQNWQDGKALGALVDSCAPGLCPDWESWDPQKPVDNAREAMQQADDWLGVPQVITPEEIIHPDVDEHSVMTYLSQFPKAKLKPGAPLKPKLNPKKARAYGRGIEPTGNMVKQPAKFTVDTISAGQGDVMVFVEDPEGNKEEAQVTPDSDKNKTYSVEYLPKVTGLHKVTVLFAGQHISKSPFEVSVDKAQGDASKVTAKGPGLEAVGNIANKPTYFDIYTAGAGVGDIGVEVEDPQGKNTVELLVEDKGNQVYRCVYKPMQPGPHVVKIFFAGDTIPKSPFVVQVGEACNPNACRASGRGLQPKGVRIRETTDFKVDTKAAGSGELGVTMKGPKGLEELVKQKDFLDGVYAFEYYPSTPGRYSIAITWGGHHIPKSPFEVQVGPEAGMQKVRAWGPGLHGGIVGRSADFVVESIGSEVGSLGFAIEGPSQAKIEYNDQNDGSCDVKYWPKEPGEYAVHIMCDDEDIKDSPYMAFIHPATGGYNPDLVRAYGPGLEKSGCIVNNLAEFTVDPKDAGKAPLKIFAQDGEGQRIDIQMKNRMDGTYACSYTPVKAIKHTIAVVWGGVNIPHSPYRVNIGQGSHPQKVKVFGPGVERSGLKANEPTHFTVDCTEAGEGDVSVGIKCDARVLSEDEEDVDFDIIHNANDTFTVKYVPPAAGRYTIKVLFASQEIPASPFRVKVDPSHDASKVKAEGPGLSKAGVENGKPTHFTVYTKGAGKAPLNVQFNSPLPGDAVKDLDIIDNYDYSHTVKYTPTQQGNMQVLVTYGGDPIPKSPFTVGVAAPLDLSKIKLNGLENRVEVGKDQEFTVDTRGAGGQGKLDVTILSPSRKVVPCLVTPVTGRENSTAKFIPREEGLYAVDVTYDGHPVPGSPYTVEASLPPDPSKVKAHGPGLEGGLVGKPAEFTIDTKGAGTGGLGLTVEGPCEAKIECSDNGDGTCSVSYLPTKPGEYFVNILFEEVHIPGSPFKADIEMPFDPSKVVASGPGLEHGKVGEAGLLSVNCSEAGPGALGLEAVSDSGTKAEVSIQNNKDGTYAVTYVPLTAGMYTLTMKYGGELVPHFPARVKVEPAVDTSRIKVFGPGIEGKDVFREATTDFTVDSRPLTQVGGDHIKAHIANPSGASTECFVTDNADGTYQVEYTPFEKGLHVVEVTYDDVPIPNSPFKVAVTEGCQPSRVQAQGPGLKEAFTNKPNVFTVVTRGAGIGGLGITVEGPSESKINCRDNKDGSCSAEYIPFAPGDYDVNITYGGAHIPGSPFRVPVKDVVDPSKVKIAGPGLGSGVRARVLQSFTVDSSKAGLAPLEVRVLGPRGLVEPVNMVDNGDGTHTVTYTPSQEGPYMVSVKYADEEIPRSPFKVKVLPTYDASKVTASGPGLSSYGVPASLPVDFAIDARDAGEGLLAVQITDQEGKPKRAIVHDNKDGTYAVTYIPDKTGRYMIGVTYGGDDIPLSPYRIRATQTGDASKCLATGPGIASTVKTGEEVGFVVDAKTAGKGKVTCTVLTPDGTEAEADVIENEDGTYDIFYTAAKPGTYVIYVRFGGVDIPNSPFTVMATDGEVTAVEEAPVNACPPGFRPWVTEEAYVPVSDMNGLGFKPFDLVIPFAVRKGEITGEVHMPSGKTATPEIVDNKDGTVTVRYAPTEVGLHEMHIKYMGSHIPESPLQFYVNYPNSGSVSAYGPGLVYGVANKTATFTIVTEDAGEGGLDLAIEGPSKAEISCIDNKDGTCTVTYLPTLPGDYSILVKYNDKHIPGSPFTAKITDDSRRCSQVKLGSAADFLLDISETDLSSLTASIKAPSGRDEPCLLKRLPNNHIGISFIPREVGEHLVSIKKNGNHVANSPVSIMVVQSEIGDARRAKVYGRGLSEGRTFEMSDFIVDTRDAGYGGISLAVEGPSKVDIQTEDLEDGTCKVSYFPTVPGVYIVSTKFADEHVPGSPFTVKISGEGRVKESITRTSRAPSVATVGSICDLNLKIPEINSSDMSAHVTSPSGRVTEAEIVPMGKNSHCVRFVPQEMGVHTVSVKYRGQHVTGSPFQFTVGPLGEGGAHKVRAGGPGLERGEAGVPAEFSIWTREAGAGGLSIAVEGPSKAEITFDDHKNGSCGVSYIAQEPGNYEVSIKFNDEHIPESPYLVPVIAPSDDARRLTVMSLQESGLKVNQPASFAIRLNGAKGKIDAKVHSPSGAVEECHVSELEPDKYAVRFIPHENGVHTIDVKFNGSHVVGSPFKVRVGEPGQAGNPALVSAYGTGLEGGTTGIQSEFFINTTRAGPGTLSVTIEGPSKVKMDCQETPEGYKVMYTPMAPGNYLISVKYGGPNHIVGSPFKAKVTGQRLVSPGSANETSSILVESVTRSSTETCYSAIPKASSDASKVTSKGAGLSKAFVGQKSSFLVDCSKAGSNMLLIGVHGPTTPCEEVSMKHVGNQQYNVTYVVKERGDYVLAVKWGEEHIPGSPFHVTVP

SEQ ID NO: 50 - protein, 591 aa, Homo sapiens
MFGIQESIQRSGSSMKEEPLGSGMNAVRTWMQGAGVLDANTAAQSGVGLARAHFEKQPPSNLRKSNFFHFVLALYDRQGQPVEIERTAFVGFVEKEKEANSEKTNNGIHYRLQLLYSNGIRTEQDFYVRLIDSMTKQAIVYEGQDKNPEMCRVLLTHEIMCSRCCDKKSCGNRNETPSDPVIIDRFFLKFFLKCNQNCLKNAGNPRDMRRFQVVVSTTVNVDGHVLAVSDNMFVHNNSKHGRRARRLDPSEGTPSYLEHATPCIKAISPSEGWTTGGATVIIIGDNFFDGLQVIFGTMLVWSELITPHAIRVQTPPRHIPGVVEVTLSYKSKQFCKGTPGRFIYTALNEPTIDYGFQRLQKVIPRHPGDPERLPKEVILKRAADLVEALYGMPHNNQEIILKRAADIAEALYSVPRNHNQLPALANTSVHAGMMGVNSFSGQLAVNVSEASQATNQGFTRNSSSVSPHGYVPSTTPQQTNYNSVTTSMNGYGSAAMSNLGGSPTFLNGSAANSPYAIVPSSPTMASSTSLPSNCSSSSGIFSFSPANMVSAVKQKSAFAPVVRPQTSPPPTCTSTNGNSLQAISGMIVPPM

SEQ ID NO: 51 - protein, 410 aa, Homo sapiens
MLQEQVSEYLGVTSFKRKYPDLERRDLSHKEKLYLRELNVITETQCTLGLTALRSDEVIDLMIKEYPAKHAEYSVILQEKERQRITDHYKEYSQMQQQNTQKVEASKVPEYIKKAAKKAAEFNSNLNRERMEERRAYFDLQTHVIQVPQGKYKVLPTERTKVSSYPVALIPGQFQEYYKRYSPDELRYLPLNTALYEPPLDPELPALDSDGDSDDGEDGRGDEKRKNKGTSDSSSGNVSEGESPPDSQEDSFQGRQKSKDKAATPRKDGPKRSVLSKSVPGYKPKVIPNAICGICLKGKESNKKGKAESLIHCSQCENSGHPSCLDMTMELVSMIKTYPWQCMECKTCIICGQPHHEEEMMFCDMCDRGYHTFCVGLGAIPSGRWICDCCQRAPPTPRKVGRRGKNSKEG

SEQ ID NO: 52 - protein, 1019 aa, Homo sapiens
MLWRVLLSKRPPFPHPELDFQEAPIPSCPGRLPGRKNSVALAAAPRKEPTGDREKPLPFPVLAPFSNPEHSAPAKVVRAAVPKQRKGSKVGDFGDAINWPTPGEIAHKSVQPQSHKPQPTRKLPPKKDMKEQEKGEGSDSKESPKTKSDESGEEKNGDEDCQRGGQKKKGNKHKWVPLQIDMKPEVPREKLASRPTRPPEPRHIPANRGEIKGSESATYVPVAPPTPAWQPEIKPEPAWHDQDETSSVKSDGAGGARASFRGRGRGRGRGRGRGRGGTRTHFDYQFGYRKFDGVEGPRTPKYMNNITYYFDNVSSTELYSVDQELLKDYIKRQIEYYFSVDNLERDFFLRRKMDADGFLPITLIASFHRVQALTTDISLIFAALKDSKVVEIVDEKVRRREEPEKWPLPPIVDYSQTDFSQLLNCPEFVPRQHYQKETESAPGSPRAVTPVPTKTEEVSNLKTLPKGLSASLPDLDSENWIEVKKRPRPSPARPKKSEESRFSHLTSLPQQLPSQQLMSKDQDEQEELDFLFDEEMEQMDGRKNTFTAWSDEESDYEIDDRDVNKILIVTQTPHYMRRHPGGDRTGNHTSRAKMSAELAKVINDGLFYYEQDLWAEKFEPEYSQIKQEVENFKKVNMISREQFDTLTPEPPVDPNQEVPPGPPRFQQVPTDALANKLFGAPEPSTIARSLPTTVPESPNYRNTRTPRTPRTPQLKDSSQTSRFYPVVKEGRTLDAKMPRKRKTRHSSNPPLESHVGWVMDSREHRPRTASISSSPSEGTPTVGSYGCTPQSLPKFQHPSHELLKENGFTQHVYHKYRRRCLNERKRLGIGQSQEMNTLFRFWSFFLRDHFNKKMYEEFKQLALEDAKEGYRYGLECLFRYYSYGLEKKFRLDIFKDFQEETVKDYEAGQLYGLEKFWAFLKYSKAKNLDIDPKLQEYLGKFRRLEDFRVDPPMGEEGNHKRHSVVAGGGGGEGRKRCPSQSSSRPAAMISQPPTPPTGQPVREDAKWTSQHSNTQTLGK

SEQ ID NO: 53 - protein, 1066 aa, Homo sapiens
MMTSVSSDHCRGAREKPQISAAQSTQPQKQVVQATAEQMRLAQVIFDKNDSDFEAKVKQLMEVTGKNQDECIVALHDCNGDVNKAINILLEGNSDTTSWETVGCKKKNFAKENSENKENREKKSEKESSRGRGNNNRKGRGGNRGREFRGEENGIDCNQVDKPSDRGKRARGRELASNTHNIAQDLSNKSSYGLKGAWKNSVEEWTTEDWTEDLSETKVFTASSAPAENHILPGQSIDLVALLQKPVPHSQASEANSFETSQQQGFGQALVFTNSQHNNQMAPGTGSSTAVNSCSPQSLSSVLGSGFGELAPPKMANITSSQILDQLKAPSLGQFTTTPSTQQNSTSHPTTTTSWDLKPPTSQSSVLSHLDFKSQPEPSPVLSQLSQRQQHQSQAVTVPPPGLESFPSQAKLRESTPGDSPSTVNKLLQLPSTTIENISVSVHQPQPKHIKLAKRRIPPASKIPASAVEMPGSADVTGLNVQFGALEFGSEPSLSEFGSAPSSENSNQIPISLYSKSLSEPLNTSLSMTSAVQNSTYTTSVITSCSLTSSSLNSASPVAMSSSYDQSSVHNRIPYQSPVSSSESAPGTIMNGHGGGRSQQTLDTPKTTGPPSALPSVSSLPSTTSCTALLPSTSQHTGDLTSSPLSQLSSSLSSHQSSLSAHAALSSSTSHTHASVESASSHQSSATFSTAATSVSSSASSGASLSSSMNTANSLCLGGTPASASSSSSRAAPLVTSGKAPPNLPQGVPPLLHNQYLVGPGGLLPAYPIYGYDELQMLQSRLPVDYYGIPFAAPTALASRDGSLANNPYPGDVTKFGRGDSASPAPATTPAQPQQSQSQTHHTAQQPFVNPALPPGYSYTGLPYYTGMPSAFQYGPTMFVPPASAKQHGVNLSTPTPPFQQASGYGQHGYSTGYDDLTQGTAAGDYSKGGYAGSSQAPNKSAGSGPGKGVSVSSSTTGLPDMTGSVYNKTQTFDKQGFHAGTPPPFSLPSVLGSTGPLASGAAPGYAPPPFLHILPAHQQPHSQLLHHHLPQDAQSGSGQRSQPSSLQPKSQASKPAYGNSPYWTN

SEQ ID NO: 54 - protein, 2542 aa, Homo sapiens
MLTDSGGGGTSFEEDLDSVAPRSAPAGASEPPPPGGVGLGIRTVRLFGEAGPASGVGSSGGGGSGSGTGGGDAALDFKLAAAVLRTGGGGGASGSDEDEVSEVESFILDQEDLDNPVLKTTSEIFLSSTAEGADLRTVDPETQARLEALLEAAGIGKLSTADGKAFADPEVLRRLTSSVSCALDEAAAALTRMKAENSHNAGQVDTRSLAEACSDGDVNAVRKLLDEGRSVNEHTEEGESLLCLACSAGYYELAQVLLAMHANVEDRGNKGDITPLMAASSGGYLDIVKLLLLHDADVNSQSATGNTALTYACAGGFVDIVKVLLNEGANIEDHNENGHTPLMEAASAGHVEVARVLLDHGAGINTHSNEFKESALTLACYKGHLDMVRFLLEAGADQEHKTDEMHTALMEACMDGHVEVARLLLDSGAQVNMPADSFESPLTLAACGGHVELAALLIERGANLEEVNDEGYTPLMEAAREGHEEMVALLLAQGANINAQTEETQETALTLACCGGFSEVADFLIKAGADIELGCSTPLMEASQEGHLELVKYLLASGANVHATTATGDTALTYACENGHTDVADVLLQAGADLEHESEGGRTPLMKAARAGHLCTVQFLISKGANVNRATANNDHTVVSLACAGGHLAVVELLLAHGADPTHRLKDGSTMLIEAAKGGHTNVVSYLLDYPNNVLSVPTTDVSQLPPPSQDQSQVPRVPTHTLAMVVPPQEPDRTSQENSPALLGVQKGTSKQKSSSLQVADQDLLPSFHPYQPLECIVEETEGKLNELGQRISAIEKAQLKSLELIQGEPLNKDKIEELKKNREEQVQKKKKILKELQKVERQLQMKTQQQFTKEYLETKGQKDTVSLHQQCSHRGVFPEGEGDGSLPEDHFSELPQVDTILFKDNDVDDEQQSPPSAEQIDFVPVQPLSSPQCNFSSDLGSNGTNSLELQKVSGNQQIVGQPQIAITGHDQGLLVQEPDGLMVATPAQTLTDTLDDLIAAVSTRVPTGSNSSSQTTECLTPESCSQTTSNVASQSMPPVYPSVDIDAHTESNHDTALTLACAGGHEELVSVLIARDAKIEHRDKKGFTPLILAATAGHVGVVEILLDKGGDIEAQSERTKDTPLSLACSGGRQEVVDLLLARGANKEHRNVSDYTPLSLAASGGYVNIIKILLNAGAEINSRTGSKLGISPLMLAAMNGHVPAVKLLLDMGSDINAQIETNRNTALTLACFQGRAEVVSLLLDRKANVEHRAKTGLTPLMEAASGGYAEVGRVLLDKGADVNAPPVPSSRDTALTIAADKGHYKFCELLIHRGAHIDVRNKKGNTPLWLASNGGHFDVVQLLVQAGADVDAADNRKITPLMSAFRKGHVKVVQYLVKEVNQFPSDIECMRYIATITDKELLKKCHQCVETIVKAKDQQAAEANKNASILLKELDLEKSREESRKQALAAKREKRKEKRKKKKEEQKRKQEEDEENKPKENSELPEDEDEEENDEDVEQEVPIEPPSATTTTTIGISATSATFTNVFGKKRANVVTTPSTNRKNKKNKTKETPPTAHLILPEQHMSLAQQKADKNKINGEPRGGGAGGNSDSDNLDSTDCNSESSSGGKSQELNFVMDVNSSKYPSLLLHSQEEKTSTATSKTQTRLEGEVTPNSLSTSYKTVSLPLSSPNIKLNLTSPKRGQKREEGWKEVVRRSKKLSVPASVVSRIMGRGGCNITAIQDVTGAHIDVDKQKDKNGERMITIRGGTESTRYAVQLINALIQDPAKELEDLIPKNHIRTPASTKSIHANFSSGVGTTAASSKNAFPLGAPTLVTSQATTLSTFQPANKLNKNVPTNVRSSFPVSLPLAYPHPHFALLAAQTMQQIRHPRLPMAQFGGTFSPSPNTWGPFPVRPVNPGNTNSSPKHNNTSRLPNQNGTVLPSESAGLATASCPITVSSVVAASQQLCVTNTRTPSSVRKQLFACVPKTSPPATVISSVTSTCSSLPSVSSAPITSGQAPTTFLPASTSQAQLSSQKMESFSAVPPTKEKVSTQDQPMANLCTPSSTANSCSSSASNTPGAPETHPSSSPTPTSSNTQEEAQPSSVSDLSPMSMPFASNSEPAPLTLTSPRMVAADNQDTSNLPQLAVPAPRVSHRMQPRGSFYSMVPNATIHQDPQSIFVTNPVTLTPPQGPPAAVQLSSAVNIMNGSQMHINPANKSLPPTFGPATLFNHFSSLFDSSQVPANQGWGDGPLSSRVATDASFTVQSAFLGNSVLGHLENMHPDNSKAPGFRPPSQRVSTSPVGLPSIDPSGSSPSSSSAPLASFSGIPGTRVFLQGPAPVGTPSFNRQHFSPHPWTSASNSSTSAPPTLGQPKGVSASQDRKIPPPIGTERLARIRQGGSVAQAPAGTSFVAPVGHSGIWSFGVNAVSEGLSGWSQSVMGNHPMHQQLSDPSTFSQHQPMERDDSGMVAPSNIFHQPMASGFVDFSKGLPISMYGGTIIPSHPQLADVPGGPLFNGLHNPDPAWNPMIKVIQNSTECTDAQQIWPGTWAPHIGNMHLKYVN

SEQ ID NO: 55 - protein, 570 aa, Homo sapiens
MAGGAREVLTLQLGHFAGFVGAHWWNQQDAALGRATDSKEPPGELCPDVLYRTGRTLHGQETYTPRLILMDLKGSLSSLKEEGGLYRDKQLDAAIAWQGKLTTHKEELYPKNPYLQDFLSAEGVLSSDGVWRVKSIPNGKGSSPLPTATTPKPLIPTEASIRVWSDFLRVHLHPRSICMIQKYNHDGEAGRLEAFGQGESVLKEPKYQEELEDRLHFYVEECDYLQGFQILCDLHDGFSGVGAKAAELLQDEYSGRGIITWGLLPGPYHRGEAQRNIYRLLNTAFGLVHLTAHSSLVCPLSLGGSLGLRPEPPVSFPYLHYDATLPFHCSAILATALDTVTVPYRLCSSPVSMVHLADMLSFCGKKVVTAGAIIPFPLAPGQSLPDSLMQFGGATPWTPLSACGEPSGTRCFAQSVVLRGIDRACHTSQLTPGTPPPSALHACTTGEEILAQYLQQQQPGVMSSSHLLLTPCRVAPPYPHLFSSCSPPGMVLDGSPKGAAVESIPVFGALCSSSSLHQTLEALARDLTKLDLRRWASFMDAGVEHDDVAELLQELQSLAQCYQGGDSLVD

SEQ ID NO: 56 - protein, 707 aa, Homo sapiens; identical to SEQ ID NO: 10

SEQ ID NO: 57 - protein, 1391 aa, Homo sapiens
MPSSLLGAAMPASTSAAALQEALENAGRLIDRQLQEDRMYPDLSELLMVSAPNNPTVSGMSDMDYPLQGPGLLSVPNLPEISSIRRVPLPPELVEQFGHMQCNCMMGVFPPISRAWLTIDSDIFMWNYEDGGDLAYFDGLSETILAVGLVKPKAGIFQPHVRHLLVLATPVDIVILGLSYANLQTGSGVLNDSLSGGMQLLPDPLYSLPTDNTYLLTITSTDNGRIFLAGKDGCLYEVAYQAEAGWFSQRCRKINHSKSSLSFLVPSLLQFTFSEDDPILQIAIDNSRNILYTRSEKGVIQVYDLGQDGQGMSRVASVSQNAIVSAAGNIARTIDRSVFKPIVQIAVIENSESLDCQLLAVTHAGVRLYFSTCPFRQPLARPNTLTLVHVRLPPGFSASSTVEKPSKVHRALYSKGILLMAASENEDNDILWCVNHDTFPFQKPMMETQMTAGVDGHSWALSAIDELKVDKIITPLNKDHIPITDSPVVVQQHMLPPKKFVLLSAQGSLMFHKLRPVDQLRHLLVSNVGGDGEEIERFFKLHQEDQACATCLILACSTAACDREVSAWATRAFFRYGGEAQMRFPTTLPPPSNVGPILGSPVYSSSPVPSGSPYPNPSFLGTPSHGIQPPAMSTPVCALGNPATQATNMSCVTGPEIVYSGKHNGICIYFSRIMGNIWDASLVVERIFKSGNREITAIESSVPCQLLESVLQELKGLQEFLDRNSQFAGGPLGNPNTTAKVQQRLIGFMRPENGNPQQMQQELQRKFHEAQLSEKISLQAIQQLVRKSYQALALWKLLCEHQFTIIVAELQKELQEQLKITTFKDLVIRDKELTGALIASLINCYIRDNAAVDGISLHLQDICPLLYSTDDAICSKANELLQRSRQVQNKTEKERMLRESLKEYQKISNQVDLSNVCAQYRQVRFYEGVVELSLTAAEKKDPQGLGLHFYKHGEPEEDIVGLQAFQERLNSYKCITDTLQELVNQSKAAPQSPSVPKKPGPPVLSSDPNMLSNEEAGHHFEQMLKLSQRSKDELFSIALYNWLIQVDLADKLLQVASPFLEPHLVRMAKVDQNRVRYMDLLWRYYEKNRSFSNAARVLSRLADMHSTEISLQQRLEYIARAILSAKSSTAISSIAADGEFLHELEEKMEVARIQLQIQETLQRQYSHHSSVQDAVSQLDSELMDITKLYGEFADPFKLAECKLAIIHCAGYSDPILVQTLWQDIIEKELSDSVTLSSSDRMHALSLKIVLLGKIYAGTPRFFPLDFIVQFLEQQVCTLNWDVGFVIQTMNEIGVPLPRLLEVYDQLFKSRDPFWNRMKKPLHLLDCIHVLLIRYVENPSQVLNCERRRFTNLCLDAVCGYLVELQSMSSSVAVQAITGNFKSLQAKLERLH

SEQ ID NO: 58 - protein, 729 aa, Homo sapiens
MSTRTPLPTVNERDTENHTSHGDGRQEVTSRTSRSGARCRNSIASCADEQPHIGNYRLLKTIGKGNFAKVKLARHILTGREVAIKIIDKTQLNPTSLQKLFREVRIMKILNHPNIVKLFEVIETEKTLYLIMEYASGGEVFDYLVAHGRMKEKEARSKFRQIVSAVQYCHQKRIVHRDLKAENLLLDADMNIKIADFGFSNEFTVGGKLDTFCGSPPYAAPELFQGKKYDGPEVDVWSLGVILYTLVSGSLPFDGQNLKELRERVLRGKYRIPFYMSTDCENLLKRFLVLNPIKRGTLEQIMKDRWINAGHEEDELKPFVEPELDISDQKRIDIMVGMGYSQEEIQESLSKMKYDEITATYLLLGRKSSELDASDSSSSSNLSLAKVRPSSDLNNSTGQSPHHKVQRSVFSSQKQRRYSDHAGPAIPSVVAYPKRSQTSTADSDLKEDGISSRKSSGSAVGGKGIAPASPMLGNASNPNKADIPERKKSSTVPSSNTASGGMTRRNTYVCSERTTADRHSVIQNGKENSTIPDQRTPVASTHSISSAATPDRIRFPRGTASRSTFHGQPRERRTATYNGPPASPSLSHEATPLSQTRSRGSTNLFSKLTSKLTRSRNVSAEQKDENKEAKPRSLRFTWSMKTTSSMDPGDMMREIRKVLDANNCDYEQRERFLLFCVHGDGHAENLVQWEMEVCKLPRLSLNGVRFKRISGTSIAFKNIASKIANELKL

SEQ ID NO: 59 - protein, 330 aa, Homo sapiens
MSDSEKLNLDSIIGRLLEVQGSRPGKNVQLTENEIRGLCLKSREIFLSQPILLELEAPLKICGDIHGQYYDLLRLFEYGGFPPESNYLFLGDYVDRGKQSLETICLLLAYKIKYPENFFLLRGNHECASINRIYGFYDECKRRYNIKLWKTFTDCFNCLPIAAIVDEKIFCCHGGLSPDLQSMEQIRRIMRPTDVPDQGLLCDLLWSDPDKDVQGWGENDRGVSFTFGAEVVAKFLHKHDLDLICRAHQVVEDGYEFFAKRQLVTLFSAPNYCGEFDNAGAMMSVDETLMCSFQILKPADKNKGKYGQFSGLNPGGRPITPPRNSAKAKK

SEQ ID NO: 60 - protein, 602 aa, Homo sapiens
MPYKLKKEKEPPKVAKCTAKPSSSGKDGGGENTEEAQPQPQPQPQPQAQSQPPSSNKRPSNSTPPPTQLSKIKYSGGPQIVKKERRQSSSRFNLSKNRELQKLPALKDSPTQEREELFIQKLRQCCVLFDFVSDPLSDLKFKEVKRAGLNEMVEYITHSRDVVTEAIYPEAVTMFSVNLFRTLPPSSNPTGAEFDPEEDEPTLEAAWPHLQLVYEFFLRFLESPDFQPNIAKKYIDQKFVLALLDLFDSEDPRERDFLKTILHRIYGKFLGLRAYIRRQINHIFYRFIYETEHHNGIAELLEILGSIINGFALPLKEEHKMFLIRVLLPLHKVKSLSVYHPQLAYCVVQFLEKESSLTEPVIVGLLKFWPKTHSPKEVMFLNELEEILDVIEPSEFSKVMEPLFRQLAKCVSSPHFQVAERALYYWNNEYIMSLISDNAARVLPIMFPALYRNSKSHWNKTIHGLIYNALKLFMEMNQKLFDDCTQQYKAEKQKGRFRMKEREEMWQKIEELARLNPQYPMFRAPPPLPPVYSMETETPTAEDIQLLKRTVETEAVQMLKDIKKEKVLLRRKSELPQDVYTIKALEAHKRAEEFLTASQEAL

SEQ ID NO: 61 - protein, 565 aa, Homo sapiens
MAKLWFKFQRYFRRKPVRFFTFLALYLTAGSLVFLHSGFVGQPAVSGNQANPAAAGGPAEGAELSFLGDMHLGRGFRDTGEASSIARRYGPWFKGKDGNERAKLGDYGGAWSRALKGRVVREKEEERAKYIGCYLDDTQSRALRGVSFFDYKKMTIFRCQDNCAERGYLYGGLEFGAECYCGHKIQATNVSEAECDMECKGERGSVCGGANRLSVYRLQLAQESARRYGSAVFRGCFRRPDNLSLALPVTAAMLNMSVDKCVDFCTEKEYPLAALAGTACHCGFPTTRFPLHDREDEQLCAQKCSAEEFESCGTPSYFIVYQTQVQDNRCMDRRFLPGKSKQLIALASFPGAGNTWARHLIELATGFYTGSYYFDGSLYNKGFKGERDHWRSGRTICIKTHESGQKEIEAFDAAILLIRNPYKALMAEFNRKYGGHIGFAAHAHWKGKEWPEFVRNYAPWWATHTLDWLKFGKKVLVVHFEDLKQDLFVQLGRMVSLLGVAVREDRLLCVESQKDGNFKRSGLRKLEYDPYTADMQKTISAYIKMVDAALKGRNLTGVPDDYYPR

SEQ ID NO: 62 - protein, 215 aa, Homo sapiens
MASRGATRPNGPNTGNKICQFKLVLLGESAVGKSSLVLRFVKGQFHEFQESTIGAAFLTQTVCLDDTTVKFEIWDTAGQERYHSLAPMYYRGAQAAIVVYDITNEESFARAKNWVKELQRQASPNIVIALSGNKADLANKRAVDFQEAQSYADDNSLLFMETSAKTSMNVNEIFMAIAKKLPKNEPQNPGANSARGRGVDLTEPTQPTRNQCCSN

SEQ ID NO: 63 - protein, 318 aa, Homo sapiens
MPKRGKKGAVAEDGDELRTEPEAKKSKTAAKKNDKEAAGEGPALYEDPPDQKTSPSGKPATLKICSWNVDGLRAWIKKKGLDWVKEEAPDILCLQETKCSENKLPAELQELPGLSHQYWSAPSDKEGYSGVGLLSRQCPLKVSYGIGDEEHDQEGRVIVAEFDSFVLVTAYVPNAGRGLVRLEYRQRWDEAFRKFLKGLASRKPLVLCGDLNVAHEEIDLRNPKGNKKNAGFTPQERQGFGELLQAVPLADSFRHLYPNTPYAYTFWTYMMNARSKNVGWRLDYFLLSHSLLPALCDSKIRSKALGSDHCPITLYLAL

SEQ ID NO: 64 - protein, 536 aa, Homo sapiens
MDKVGKMWNNFKYRCQNLFGHEGGSRSENVDMNSNRCLSVKEKNISIGDSTPQQQSSPLRENIALQLGLSPSKNSSRRNQNCATEIPQIVEISIEKDNDSCVTPGTRLARRDSYSRHAPWGGKKKHSCSTKTQSSLDADKKFGRTRSGLQRRERRYGVSSVHDMDSVSSRTVGSRSLRQRLQDTVGLCFPMRTYSKQSKPLFSNKRKIHLSELMLEKCPFPAGSDLAQKWHLIKQHTAPVSPHSTFFDTFDPSLVSTEDEEDRLRERRRLSIEEGVDPPPNAQIHTFEATAQVNPLYKLGPKLAPGMTEISGDSSAIPQANCDSEEDTTTLCLQSRRQKQRQISGDSHTHVSRQGAWKVHTQIDYIHCLVPDLLQITGNPCYWGVMDRYEAEALLEGKPEGTFLLRDSAQEDYLFSVSFRRYNRSLHARIEQWNHNFSFDAHDPCVFHSSTVTGLLEHYKDPSSCMFFEPLLTISLNRTFPFSLQYICRAVICRCTTYDGIDGLPLPSMLQDFLKEYHYKQKVRVRWLEREPVKAK

SEQ ID NO: 65 - protein, 787 aa, Homo sapiens
MAVWIQAQQLQGEALHQMQALYGQHFPIEVRHYLSQWIESQAWDSVDLDNPQENIKATQLLEGLVQELQKKAEHQVGEDGFLLKIKLGHYATQLQNTYDRCPMELVRCIRHILYNEQRLVREANNGSSPAGSLADAMSQKHLQINQTFEELRLVTQDTENELKKLQQTQEYFIIQYQESLRIQAQFGPLAQLSPQERLSRETALQQKQVSLEAWLQREAQTLQQYRVELAEKHQKTLQLLRKQQTIILDDELIQWKRRQQLAGNGGPPEGSLDVLQSWCEKLAEIIWQNRQQIRRAEHLCQQLPIPGPVEEMLAEVNATITDIISALVTSTFIIEKQPPQVLKTQTKFAATVRLLVGGKLNVHMNPPQVKATIISEQQAKSLLKNENTRNDYSGEILNNCCVMEYHQATGTLSAHFRNMSLKRIKRSDRRGAESVTEEKFTILFESQFSVGGNELVFQVKTLSLPVVVIVHGSQDNNATATVLWDNAFAEPGRVPFAVPDKVLWPQLCEALNMKFKAEVQSNRGLTKENLVFLAQKLFNNSSSHLEDYSGLSVSWSQFNRENLPGRNYTFWQWFDGVMEVLKKHLKPHWNDGAILGFVNKQQAHDLLINKPDGTFLLRFSDSEIGGITIAWKFDSQERMFWNLMPFTTRDFSIRSLADRLGDLNYLIYVFPDRPKDEVYSKYYTPVPCESATAKAVDGYVKPQIKQVVPEFVNASADAGGGSATYMDQAPSPAVCPQAHYNMYPQNPDSVLDTDGDFDLEDTMDVARRVEELLGRPMDSQWIPHAQS

SEQ ID NO: 66 - protein, 1199 aa, Homo sapiens
MPLTGVEPARMNRKKGDKGFESPRPYKLTHQVVCINNINFQRKSVVGFVELTIFPTVANLNRIKLNSKQCRIYRVRINDLEAAFIYNDPTLEVCHSESKQRNLNYFSNAYAAAVSAVDPDAGNGELCIKVPSELWKHVDELKVLKIHINFSLDQPKGGLHFVVPSVEGSMAERGAHVFSCGYQNSTRFWFPCVDSYSELCTWKLEFTVDAAMVAVSNGDLVETVYTHDMRKKTFHYMLTIPTAASNISLAIGPFEILVDPYMHEVTHFCLPQLLPLLKHTTSYLHEVFEFYEEILTCRYPYSCFKTVFIDEAYVEVAAYASMSIFSTNLLHSAMIIDETPLTRRCLAQSLAQQFFGCFISRMSWSDEWVLKGISGYIYGLWMKKTFGVNEYRHWIKEELDKIVAYELKTGGVLLHPIFGGGKEKDNPASHLHFSIKHPHTLSWEYYTMFQCKAHLVMRLIENRISMEFMLQVFNKLLSLASTASSQKFQSHMWSQMLVSTSGFLKSISNVSGKDIQPLIKQWVDQSGVVKFYGSFAFNRKRNVLELEIKQDYTSPGTQKYVGPLKVTVQELDGSFNHTLQIEENSLKHDIPCHSKSRRNKKKKIPLMNGEEVDMDLSAMDADSPLLWIRIDPDMSVLRKVEFEQADFMWQYQLRYERDVVAQQESILALEKFPTPASRLALTDILEQEQCFYRVRMSACFCLAKIANSMVSTWTGPPAMKSLFTRMFCCKSCPNIVKTNNFMSFQSYFLQKTMPVAMALLRDVHNLCPKEVLTFILDLIKYNDNRKNKFSDNYYRAEMIDALANSVTPAVSVNNEVRTLDNLNPDVRLILEEITRFLNMEKLLPSYRHTITVSCLRAIRVLQKNGHVPSDPALFKSYAEYGHFVDIRIAALEAVVDYTKVDRSYEELQWLLNMIQNDPVPYVRHKILNMLTKNPPFTKNMESPLCNEALVDQLWKLMNSGTSHDWRLRCGAVDLYFTLFGLSRPSCLPLPELGLVLNLKEKKAVLNPTIIPESVAGNQEAANNPSSHPQLVGFQNPFSSSQDEEEIDMDTVHDSQAFISHHLNMLERPSTPGLSKYRPASSRSALIPQHSAGCDSTPTTKPQWSLELARKGTGKEQAPLEMSMHPAASAPLSVFTKESTASKHSDHHHHHHHEHKKKKKKHKHKHKHKHKHDSKEKDKEPFTFSSPASGRSIRSPSLSD

SEQ ID NO: 67 - protein, 390 aa, Homo sapiens
MAVSESQLKKMVSKYKYRDLTVRETVNVITLYKDLKPVLDSYVFNDGSSRELMNLTGTIPVPYRGNTYNIPICLWLLDTYPYNPPICFVKPTSSMTIKTGKHVDANGKIYLPYLHEWKHPQSDLLGLIQVMIVVFGDEPPVFSRPISASYPPYQATGPPNTSYMPGMPGGISPYPSGYPPNPSGYPGCPYPPGGPYPATTSSQYPSQPPVTTVGPSRDGTISEDTIRASLISAVSDKLRWRMKEEMDRAQAELNALKRTEEDLKKGHQKLEEMVTRLDQEVAEVDKNIELLKKKDEELSSALEKMENQSENNDIDEVIIPTAPLYKQILNLYAEENAIEDTIFYLGEALRRGVIDLDVFLKHVRLLSRKQFQLRALMQKARKTAGLSDLY

SEQ ID NO: 68 - protein, 323 aa, Homo sapiens
MSAVCGGAARMLRTPGRHGYAAEFSPYLPGRLACATAQHYGIAGCGTLLILDPDEAGLRLFRSFDWNDGLFDVTWSENNEHVLITCSGDGSLQLWDTAKAAGPLQVYKEHAQEVYSVDWSQTRGEQLVVSGSWDQTVKLWDPTVGKSLCTFRGHESIIYSTIWSPHIPGCFASASGDQTLRIWDVKAAGVRIVIPAHQAEILSCDWCKYNENLLVTGAVDCSLRGWDLRNVRQPVFELLGHTYAIRRVKFSPFHASVLASCSYDFTVRFWNFSKPDSLLETVEHHTEFTCGLDFSLQSPTQVADCSWDETIKIYDPACLTIPA

SEQ ID NO: 69 - protein, 492 aa, Homo sapiens
MEPSSKKLTGRLMLAVGGAVLGSLQFGYNTGVINAPQKVIEEFYNQTWVHRYGESILPTTLTTLWSLSVAIFSVGGMIGSFSVGLFVNRFGRRNSMLMMNLLAFVSAVLMGFSKLGKSFEMLILGRFIIGVYCGLTTGFVPMYVGEVSPTAFRGALGTLHQLGIVVGILIAQVFGLDSIMGNKDLWPLLLSIIFIPALLQCIVLPFCPESPRFLLINRNEENRAKSVLKKLRGTADVTHDLQEMKEESRQMMREKKVTILELFRSPAYRQPILIAVVLQLSQQLSGINAVFYYSTSIFEKAGVQQPVYATIGSGIVNTAFTVVSLFVVERAGRRTLHLIGLAGMAGCAILMTIALALLEQLPWMSYLSIVAIFGFVAFFEVGPGPIPWFIVAELFSQGPRPAAIAVAGFSNWTSNFIVGMCFQYVEQLCGPYVFIIFTVLLVLFFIFTYFKVPETKGRTFDEIASGFRQGGASQSDKTPEELFHPLGADSQV

SEQ ID NO: 70 - protein, 519 aa, Homo sapiens
MDADEGQDMSQVSGKESPPVSDTPDEGDEPMPIPEDLSTTSGGQQSSKSDRVVASNVKVETQSDEENGRACEMNGEECAEDLRMLDASGEKMNGSHRDQGSSALSGVGGIRLPNGKLKCDICGIICIGPNVLMVHKRSHTGERPFQCNQCGASFTQKGNLLRHIKLHSGEKPFKCHLCNYACRRRDALTGHLRTHSVGKPHKCGYCGRSYKQRSSLEEHKERCHNYLESMGLPGTLYPVIKEETNHSEMAEDLCKIGSERSLVLDRLASNVAKRKSSMPQKFLGDKGLSDTPYDSSASYEKENEMMKSHVMDQAINNAINYLGAESLRPLVQTPPGGSEVVPVISPMYQLHKPLAEGTPRSNHSAQDSAVENLLLLSKAKLVPSEREASPSNSCQDSTDTESNNEEQRSGLIYLTNHIAPHARNGLSLKEEHRAYDLLRAASENSQDALRVVSTSGEQMKVYKCEHCRVLFLDHVMYTIHMGCHGFRDPFECNMCGYHSQDRYEFSSHITRGEHRFHMS

SEQ ID NO: 71 - protein, 3957 aa, Homo sapiens
MMNEDAAQKSDSGEKFNGSSQRRKRPKKSDSNASFLRAARAGNLDKVVEYLKGGIDINTCNQNGLNALHLAAKEGHVGLVQELLGRGSSVDSATKKGNTALHIASLAGQAEVVKVLVKEGANINAQSQNGFTPLYMAAQENHIDVVKYLLENGANQSTATEDGFTPLAVALQQGHNQAVAILLENDTKGKVRLPALHIAARKDDTKSAALLLQNDHNADVQSKMMVNRTTESGFTPLHIAAHYGNVNVATLLLNRGAAVDFTARNGITPLHVASKRGNTNMVKLLLDRGGQIDAKTRDGLTPLHCAARSGHDQVVELLLERGAPLLARTKNGLSPLHMAAQGDHVECVKHLLQHKAPVDDVTLDYLTALHVAAHCGHYRVTKLLLDKRANPNARALNGFTPLHIACKKNRIKVMELLVKYGASIQAITESGLTPIHVAAFMGHLNIVLLLLQNGASPDVTNIRGETALHMAARAGQVEVVRCLLRNGALVDARAREEQTPLHIASRLGKTEIVQLLLQHMAHPDAATTNGYTPLHISAREGQVDVASVLLEAGAAHSLATKKGFTPLHVAAKYGSLDVAKLLLQRRAAADSAGKNGLTPLHVAAHYDNQKVALLLLEKGASPHATAKNGYTPLHIAAKKNQMQIASTLLNYGAETNIVTKQGVTPLHLASQEGHTDMVTLLLDKGANIHMSTKSGLTSLHLAAQEDKVNVADILTKHGADQDAHTKLGYTPLIVACHYGNVKMVNFLLKQGANVNAKTKNGYTPLHQAAQQGHTHIINVLLQHGAKPNATTANGNTALAIAKRLGYISVVDTLKVVTEEVTTTTTTITEKHKLNVPETMTEVLDVSDEEGDDTMTGDGGEYLRPEDLKELGDDSLPSSQFLDGMNYLRYSLEGGRSDSLRSFSSDRSHTLSHASYLRDSAVMDDSVVIPSHQVSTLAKEAERNSYRLSWGTENLDNVALSSSPIHSGFLVSFMVDARGGAMRGCRHNGLRIIIPPRKCTAPTRVTCRLVKRHRLATMPPMVEGEGLASRLIEVGPSGAQFLGKLHLPTAPPPLNEGESLVSRILQLGPPGTKFLGPVIVEIPHFAALRGKERELVVLRSENGDSWKEHFCDYTEDELNEILNGMDEVLDSPEDLEKKRICRIITRDFPQYFAVVSRIKQDSNLIGPEGGVLSSTVVPQVQAVFPEGALTKRIRVGLQAQPMHSELVKKILGNKATFSPIVTLEPRRRKFHKPITMTIPVPKASSDVMLNGFGGDAPTLRLLCSITGGTTPAQWEDITGTTPLTFVNECVSFTTNVSARFWLIDCRQIQESVTFASQVYREIICVPYMAKFVVFAKSHDPIEARLRCFCMTDDKVDKTLEQQENFAEVARSRDVEVLEGKPIYVDCFGNLVPLTKSGQHHIFSFFAFKENRLPLFVKVRDTTQEPCGRLSFMKEPKSTRGLVHQAICNLNITLPIYTKESESDQEQEEEIDMTSEKNDETESTETSVLKSHLVNEVPVLASPDLLSEVSEMKQDLIKMTAILTTDVSDKAGSIKVKELVKAAEEEPGEPFEIVERVKEDLEKVNEILRSGTCTRDESSVQSSRSERGLVEEEWVIVSDEEIEEARQKAPLEITEYPCVEVRIDKEIKGKVEKDSTGLVNYLTDDLNTCVPLPKEQLQTVQDKAGKKCEALAVGRSSEKEGKDIPPDETQSTQKQHKPSLGIKKPVRRKLKEKQKQKEEGLQASAEKAELKKGSSEESLGEDPGLAPEPLPTVKATSPLIEETPIGSIKDKVKALQKRVEDEQKGRSKLPIRVKGKEDVPKKTTHRPHPAASPSLKSERHAPGSPSPKTERHSTLSSSAKTERHPPVSPSSKTEKHSPVSPSAKTERHSPASSSSKTEKHSPVSPSTKTERHSPVSSTKTERHPPVSPSGKTDKRPPVSPSGRTEKHPPVSPGRTEKRLPVSPSGRTDKHQPVSTAGKTEKHLPVSPSGKTEKQPPVSPTSKTERIEETMSVRELMKAFQSGQDPSKHKTGLFEHKSAKQKQPQEKGKVRVEKEKGPILTQREAQKTENQTIKRGQRLPVTGTAESKRGVRVSSIGVKKEDAAGGKEKVLSHKIPEPVQSVPEEESHRESEVPKEKMADEQGDMDLQISPDRKTSTDFSEVIKQELEDNDKYQQFRLSEETEKAQLHLDQVLTSPFNTTFPLDYMKDEFLPALSLQSGALDGSSESLKNEGVAGSPCGSLMEGTPQISSEESYKHEGLAETPETSPESLSFSPKKSEEQTGETKESTKTETTTEIRSEKEHPTTKDITGGSEERGATVTEDSETSTESFQKEATLGSPKDTSPKRQDDCTGSCSVALAKETPTGLTEEAACDEGQRTFGSSAHKTQTDSEVQESTATSDETKALPLPEASVKTDTGTESKPQGVIRSPQGLELALPSRDSEVLSAVADDSLAVSHKDSLEASPVLEDNSSHKTPDSLEPSPLKESPCRDSLESSPVEPKMKAGIFPSHFPLPAAVAKTELLTEVASVRSRLLRDPDGSAEDDSLEQTSLMESSGKSPLSPDTPSSEEVSYEVTPKTTDVSTPKPAVIHECAEEDDSENGEKKRFTPEEEMFKMVTKIKMFDELEQEAKQKRDYKKEPKQEESSSSSDPDADCSVDVDEPKHTGSGEDESGVPVLVTSESRKVSSSSESEPELAQLKKGADSGLLPEPVIRVQPPSPLPSSMDSNSSPEEVQFQPVVSKQYTFKMNEDTQEEPGKSEEEKDSESHLAEDRHAVSTEAEDRSYDKLNRDTDQPKICDGHGCEAMSPSSSAAPVSSGLQSPTGDDVDEQPVIYKESLALQGTHEKDTEGEELDVSRAESPQADCPSESFSSSSSLPHCLVSEGKELDEDISATSSIQKTEVTKTDETFENLPKDCPSQDSSITTQTDRFSMDVPVSDLAENDEIYDPQITSPYENVPSQSFFSSEESKTQTDANHTTSFHSSEVYSVTITSPVEDVVVASSSSGTVLSKESNFEGQDIKMESQQESTLWEMQSDSVSSSFEPTMSATTTVVGEQISKVIITKTDVDSDSWSEIREDDEAFEARVKEEEQKIFGLMVDRQSQGTTPDTTPARTPTEEGTPTSEQNPFLFQEGKLFEMTRSGAIDMTKRSYADESFHFFQIGQESREETLSEDVKEGATGADPLPLETSAESLALSESKETVDDEADLLPDDVSEEVEEIPASDAQLNSQMGISASTETPTKEAVSVGTKDLPTVQTGDIPPLSGVKQISCPDSSEPAVQVQLDFSTLTRSVYSDRGDDSPDSSPEEQKSVIEIPTAPMENVPFTESKSKIPVRTMPTSTPAPPSAEYESSVSEDFLSSVDEENKADEAKPKSKLPVKVPLQRVEQQLSDLDTSVQKTVAPQGQDMASIAPDNRSKSESDASSLDSKTKCPVKTRSYTETETESRERAEELELESEEGATRPKILTSRLPVKSRSTTSSCRGGTSPTKESKEHFFDLYRNSIEFFEEISDEASKLVDRLTQSEREQEIVSDDESSSALEVSVIENLPPVETEHSVPEDIFDTRPIWDESIETLIERIPDENGHDHAEDPQDEQERIEERLAYIADHLGFSWTELARELDFTEEQIHQIRIENPNSLQDQSHALLKYWLERDGKHATDTNLVECLTKINRMDIVHLMETNTEPLQERISHSYAEIEQTITLDHSEGFSVLQEELCTAQHKQKEEQAVSKESETCDHPPIVSEEDISVGYSTFQDGVPKTEGDSSATALFPQTHKEQVQQDFSGKMQDLPEESSLEYQQEYFVTTPGTETSETQKAMIVPSSPSKTPEEVSTPAEEEKLYLQTPTSSERGGSPIIQEPEEPSEHREESSPRKTSLVIVESADNQPETCERLDEDAAFEKGDDMPEIPPETVTEEEYIDEHGHTVVKKVTRKIIRRYVSSEGTEKEEIMVQGMPQEPVNIEEGDGYSKVIKRVVLKSDTEQSEDNNE

SEQ ID NO: 72 - protein, 410 aa, Homo sapiens
MVLSQRQRDELNRAIADYLRSNGYEEAYSVFKKEAELDVNEELDKKYAGLLEKKWTSVIRLQKKVMELESKLNEAKEEFTSGGPLGQKRDPKEWIPRPPEKYALSGHRSPVTRVIFHPVFSVMVSASEDATIKVWDYETGDFERTLKGHTDSVQDISFDHSGKLLASCSADMTIKLWDFQGFECIRTMHGHDHNVSSVAIMPNGDHIVSASRDKTIKMWEVQTGYCVKTFTGHREWVRMVRPNQDGTLIASCSNDQTVRVWVVATKECKAELREHEHVVECISWAPESSYSSISEATGSETKKSGKPGPFLLSGSRDKTIKMWDVSTGMCLMTLVGHDNWVRGVLFHSGGKFILSCADDKTLRVWDYKNKRCMKTLNAHEHFVTSLDFHKTAPYVVTGSVDQTVKVWECR

SEQ ID NO: 73 - protein, 1802 aa, Homo sapiens; identical to SEQ ID NO: 23

SEQ ID NO: 74 - protein, 383 aa, Homo sapiens
MERRARSSSRESRGRGGRTPHKENKRAKAERSGGGRGRQEAGPEPSGSGRAGTPGEPRAPAATVVDVDEVRGSGEEGTEVVALLESERPEEGTKSSGLGACEWLLVLISLLFIIMTFPFSIWFCVKVVQEYERVIIFRLGHLLPGRAKGPGLFFFLPCLDTYHKVDLRLQTLEIPFHEIVTKDMFIMEIDAICYYRMENASLLLSSLAHVSKAVQFLVQTTMKRLLAHRSLTEILLERKSIAQDAKVALDSVTCIWGIKVERIEIKDVRLPAGLQHSLAVEAEAQRQAKVRMIAAEAEKAASESLRMAAEILSGTPAAVQLRYLHTLQSLSTEKPSTVVLPLPFDLLNCLSSPSNRTQGSLPFPSPSKPVEPLNPKKKDSPML

SEQ ID NO: 75 - protein, 672 aa, Homo sapiens
MADVFPGNDSTASQDVANRFARKGALRQKNVHEVKDHKFIARFFKQPTFCSHCTDFIWGFGKQGFQCQVCCFVVHKRCHEFVTFSCPGADKGPDTDDPRSKHKFKIHTYGSPTFCDHCGSLLYGLIHQGMKCDTCDMNVHKQCVINVPSLCGMDHTEKRGRIYLKAEVADEKLHVTVRDAKNLIPMDPNGLSDPYVKLKLIPDPKNESKQKTKTIRSTLNPQWNESFTFKLKPSDKDRRLSVEIWDWDRTTRNDFMGSLSFGVSELMKMPASGWYKLLNQEEGEYYNVPIPEGDEEGNMELRQKFEKAKLGPAGNKVISPSEDRKQPSNNLDRVKLTDFNFLMVLGKGSFGKVMLADRKGTEELYAIKILKKDVVIQDDDVECTMVEKRVLALLDKPPFLTQLHSCFQTVDRLYFVMEYVNGGDLMYHIQQVGKFKEPQAVFYAAEISIGLFFLHKRGIIYRDLKLDNVMLDSEGHIKIADFGMCKEHMMDGVTTRTFCGTPDYIAPEIIAYQPYGKSVDWWAYGVLLYEMLAGQPPFDGEDEDELFQSIMEHNVSYPKSLSKEAVSICKGLMTKHPAKRLGCGPEGERDVREHAFFRRIDWEKLENREIQPPFKPKVCGKGAENFDKFFTRGQPVLTPPDQLVIANIDQSDFEGFSYVNPQFVHPILQSAV

SEQ ID NO: 76 - protein, 779 aa, Homo sapiens
MAANGDSPPWSPALAAEGRGSSCEASVSFEDVTVDFSKEEWQHLDPAQRRLYWDVTLENYSHLLSVGYQIPKSEAAFKLEQGEGPWMLEGEAPHQSCSGEAIGKMQQQGIPGGIFFHCERFDQPIGEDSLCSILEELWQDNDQLEQRQENQNNLLSHVKVLIKERGYEHKNIEKIIHVTTKLVPSIKRLHNCDTILKHTLNSHNHNRNSATKNLGKIFGNGNNFPHSPSSTKNENAKTGANSCEHDHYEKHLSHKQAPTHHQKIHPEEKLYVCTECVMGFTQKSHLFEHQRIHAGEKSRECDKSNKVFPQKPQVDVHPSVYTGEKPYLCTQCGKVFTLKSNLITHQKIHTGQKPYKCSECGKAFFQRSDLFRHLRIHTGEKPYECSECGKGFSQNSDLSIHQKTHTGEKHYECNECGKAFTRKSALRMHQRIHTGEKPYVCADCGKAFIQKSHFNTHQRIHTGEKPYECSDCGKSFTKKSQLHVHQRIHTGEKPYICTECGKVFTHRTNLTTHQKTHTGEKPYMCAECGKAFTDQSNLIKHQKTHTGEKPYKCNGCGKAFIWKSRLKIHQKSHIGERHYECKDCGKAFIQKSTLSVHQRIHTGEKPYVCPECGKAFIQKSHFIAHHRIHTGEKPYECSDCGKCFTKKSQLRVHQKIHTGEKPNICAECGKAFTDRSNLITHQKIHTREKPYECGDCGKTFTWKSRLNIHQKSHTGERHYECSKCGKAFIQKATLSMHQIIHTGKKPYACTECQKAFTDRSNLIKHQKMHSGEKRYKASD

SEQ ID NO: 77 - protein, 2696 aa, Homo sapiens
MDQTCELPRRNCLLPFSNPVNLDAPEDKDSPFGNGQSNFSEPLNGCTMQLSTVSGTSQNAYGQDSPSCYIPLRRLQDLASMINVEYLNGSADGSESFQDPEKSDSRAQTPIVCTSLSPGGPTALAMKQEPSCNNSPELQVKVTKTIKNGFLHFENFTCVDDADVDSEMDPEQPVTEDESIEEIFEETQTNATCNYETKSENGVKVAMGSEQDSTPESRHGAVKSPFLPLAPQTETQKNKQRNEVDGSNEKAALLPAPFSLGDTNITIEEQLNSINLSFQDDPDSSTSTLGNMLELPGTSSSSTSQELPFCQPKKKSTPLKYEVGDLIWAKFKRRPWWPCRICSDPLINTHSKMKVSNRRPYRQYYVEAFGDPSERAWVAGKAIVMFEGRHQFEELPVLRRRGKQKEKGYRHKVPQKILSKWEASVGLAEQYDVPKGSKNRKCIPGSIKLDSEEDMPFEDCTNDPESEHDLLLNGCLKSLAFDSEHSADEKEKPCAKSRARKSSDNPKRTSVKKGHIQFEAHKDERRGKIPENLGLNFISGDISDTQASNELSRIANSLTGSNTAPGSFLFSSCGKNTAKKEFETSNGDSLLGLPEGALISKCSREKNKPQRSLVCGSKVKLCYIGAGDEEKRSDSISICTTSDDGSSDLDPIEHSSESDNSVLEIPDAFDRTENMLSMQKNEKIKYSRFAATNTRVKAKQKPLISNSHTDHLMGCTKSAEPGTETSQVNLSDLKASTLVHKPQSDFTNDALSPKFNLSSSISSENSLIKGGAANQALLHSKSKQPKFRSIKCKHKENPVMAEPPVINEECSLKCCSSDTKGSPLASISKSGKVDGLKLLNNMHEKTRDSSDIETAVVKHVLSELKELSYRSLGEDVSDSGTSKPSKPLLFSSASSQNHIPIEPDYKFSTLLMMLKDMHDSKTKEQRLMTAQNLVSYRSPGRGDCSTNSPVGVSKVLVSGGSTHNSEKKGDGTQNSANPSPSGGDSALSGELSASLPGLLSDKRDLPASGKSRSDCVTRRNCGRSKPSSKLRDAFSAQMVKNTVNRKALKTERKRKLNQLPSVTLDAVLQGDRERGGSLRGGAEDPSKEDPLQIMGHLTSEDGDHFSDVHFDSKVKQSDPGKISEKGLSFENGKGPELDSVMNSENDELNGVNQVVPKKRWQRLNQRRTKPRKRMNRFKEKENSECAFRVLLPSDPVQEGRDEFPEHRTPSASILEEPLTEQNHADCLDSAGPRLNVCDKSSASIGDMEKEPGIPSLTPQAELPEPAVRSEKKRLRKPSKWLLEYTEEYDQIFAPKKKQKKVQEQVHKVSSRCEEESLLARGRSSAQNKQVDENSLISTKEEPPVLEREAPFLEGPLAQSELGGGHAELPQLTLSVPVAPEVSPRPALESEELLVKTPGNYESKRQRKPTKKLLESNDLDPGFMPKKGDLGLSKKCYEAGHLENGITESCATSYSKDFGGGTTKIFDKPRKRKRQRHAAAKMQCKKVKNDDSSKEIPGSEGELMPHRTATSPKETVEEGVEHDPGMPASKKMQGERGGGAALKENVCQNCEKLGELLLCEAQCCGAFHLECLGLTEMPRGKFICNECRTGIHTCFVCKQSGEDVKRCLLPLCGKFYHEECVQKYPPTVMQNKGFRCSLHICITCHAANPANVSASKGRLMRCVRCPVAYHANDFCLAAGSKILASNSIICPNHFTPRRGCRNHEHVNVSWCFVCSEGGSLLCCDSCPAAFHRECLNIDIPEGNWYCNDCKAGKKPHYREIVWVKVGRYRWWPAEICHPRAVPSNIDKMRHDVGEFPVLFFGSNDYLWTHQARVFPYMEGDVSSKDKMGKGVDGTYKKALQEAAARFEELKAQKELRQLQEDRKNDKKPPPYKHIKVNRPIGRVQIFTADLSEIPRCNCKATDENPCGIDSECINRMLLYECHPTVCPAGGRCQNQCFSKRQYPEVEIFRTLQRGWGLRTKTDIKKGEFVNEYVGELIDEEECRARIRYAQEHDITNFYMLTLDKDRIIDAGPKGNYARFMNHCCQPNCETQKWSVNGDTRVGLFALSDIKAGTELTFNYNLECLGNGKTVCKCGAPNCSGFLGVRPKNQPIATEEKSKKFKKKQQGKRRTQGEITKEREDECFSCGDAGQLVSCKKPGCPKVYHADCLNLTKRPAGKWECPWHQCDICGKEAASFCEMCPSSFCKQHREGMLFISKLDGRLSCTEHDPCGPNPLEPGEIREYVPPPVPLPPGPSTHLAEQSTGMAAQAPKMSDKPPADTNQMLSLSKKALAGTCQRPLLPERPLERTDSRPQPLDKVRDLAGSGTKSQSLVSSQRPLDRPPAVAGPRPQLSDKPSPVTSPSSSPSVRSQPLERPLGTADPRLDKSIGAASPRPQSLEKTSVPTGLRLPPPDRLLITSSPKPQTSDRPTDKPHASLSQRLPPPEKVLSAVVQTLVAKEKALRPVDQNTQSKNRAALVMDLIDLTPRQKERAASPHQVTPQADEKMPVLESSSWPASKGLGHMPRAVEKGCVSDPLQTSGKAAAPSEDPWQAVKSLTQARLLSQPPAKAFLYEPTTQASGRASAGAEQTPGPLSQSPGLVKQAKQMVGGQQLPALAAKSGQSFRSLGKAPASLPTEEKKLVTTEQSPWALGKASSRAGLWPIVAGQTLAQSCWSAGSTQTLAQTCWSLGRGQDPKPEQNTLPALNQAPSSHKCAESEQK

SEQ ID NO: 78 - protein, 247 aa, Homo sapiens
MNPLLILTFVAAALAAPFDDDDKIVGGYNCEENSVPYQVSLNSGYHFCGGSLINEQWVVSAGHCYKSRIQVRLGEHNIEVLEGNEQFINAAKIIRHPQYDRKTLNNDIMLIKLSSRAVINARVSTISLPTAPPATGTKCLISGWGNTASSGADYPDELQCLDAPVLSQAKCEASYPGKITSNMFCVGFLEGGKDSCQGDSGGPVVCNGQLQGVVSWGDGCAQKNKPGVYTKVYNYVKWIKNTIAANS

SEQ ID NO: 79 - protein, 1030 aa, Homo sapiens
MKIPNIGNVMNKFEILGVVGEGAYGVVLKCRHKETHEIVAIKKFKDSEENEEVKETTLRELKMLRTLKQENIVELKEAFRRRGKLYLVFEYVEKNMLELLEEMPNGVPPEKVKSYIYQLIKAIHWCHKNDIVHRDIKPENLLISHNDVLKLCDFGFARNLSEGNNANYTEYVATRWYRSPELLLGAPYGKSVDMWSVGCILGELSDGQPLFPGESEIDQLFTIQKVLGPLPSEQMKLFYSNPRFHGLRFPAVNHPQSLERRYLGILNSVLLDLMKNLLKLDPADRYLTEQCLNHPTFQTQRLLDRSPSRSAKRKPYHVESSTLSNRNQAGKSTALQSHHRSNSKDIQNLSVGLPRADEGLPANESFLNGNLAGASLSPLHTKTYQASSQPGSTSKDLTNNNIPHLLSPKEAKSKTEFDFNIDPKPSEGPGTKYLKSNSRSQQNRHSFMESSQSKAGTLQPNEKQSRHSYIDTIPQSSRSPSYRTKAKSHGALSDSKSVSNLSEARAQIAEPSTSRYFPSSCLDLNSPTSPTPTRHSDTRTLLSPSGRNNRNEGTLDSRRTTTRHSKTMEELKLPEHMDSSHSHSLSAPHESFSYGLGYTSPFSSQQRPHRHSMYVTRDKVRAKGLDGSLSIGQGMAARANSLQLLSPQPGEQLPPEMTVARSSVKETSREGTSSFHTRQKSEGGVYHDPHSDDGTAPKENRHLYNDPVPRRVGSFYRVPSPRPDNSFHENNVSTRVSSLPSESSSGTNHSKRQPAFDPWKSPENISHSEQLKEKEKQGFFRSMKKKKKKSQTVPNSDSPDLLTLQKSIHSASTPSSRPKEWRPEKISDLQTQSQPLKSLRKLLHLSSASNHPASSDPRFQPLTAQQTKNSFSEIRIHPLSQASGGSSNIRQEPAPKGRPALQLPDGGCDGRRQRHHSGPQDRRFMLRTTEQQGEYFCCGDPKKPHTPCVPNRALHRPISSPAPYPVLQVRGTSMCPTLQVRGTDAFSCPTQQSGFSFFVRHVMREALIHRAQVNQAALLTYHENAALTGK

SEQ ID NO: 80 - protein, 533 aa, Homo sapiens
MAFANLRKVLISDSLDPCCRKILQDGGLQVVEKQNLSKEELIAELQDCEGLIVRSATKVTADVINAAEKLQVVGRAGTGVDNVDLEAATRKGILVMNTPNGNSLSAAELTCGMIMCLARQIPQATASMKDGKWERKKFMGTELNGKTLGILGLGRIGREVATRMQSFGMKTIGYDPIISPEVSASFGVQQLPLEEIWPLCDFITVHTPLLPSTTGLLNDNTFAQCKKGVRVVNCARGGIVDEGALLRALQSGQCAGAALDVFTEEPPRDRALVDHENVISCPHLGASTKEAQSRCGEEIAVQFVDMVKGKSLTGVVNAQALTSAFSPHTKPWIGLAEALGTLMRAWAGSPKGTIQVITQGTSLKNAGNCLSPAVIVGLLKEASKQADVNLVNAKLLVKEAGLNVTTSHSPAAPGEQGFGECLLAVALAGAPYQAVGLVQGTTPVLQGLNGAVFRPEVPLRRDLPLLLFRTQTSDPAMLPTMIGLLAEAGVRLLSYQTSLVSDGETWHVMGISSLLPSLEAWKQHVTEAFQFHF

SEQ ID NO: 81 - protein, 399 aa, Homo sapiens
MKMRFLGLVVCLVLWTLHSEGSGGKLTAVDPETNMNVSEIISYWGFPSEEYLVETEDGYILCLNRIPHGRKNHSDKGPKPVVFLQHGLLADSSNWVTNLANSSLGFILADAGFDVWMGNSRGNTWSRKHKTLSVSQDEFWAFSYDEMAKYDLPASINFILNKTGQEQVYYVGHSQGTTIGFIAFSQIPELAKRIKMFFALGPVASVAFCTSPMAKLGRLPDHLIKDLFGDKEFLPQSAFLKWLGTHVCTHVILKELCGNLCFLLCGFNERNLNMSRVDVYTTHSPAGTSVQNMLHWSQAVKFQKFQAFDWGSSAKNYFHYNQSYPPTYNVKDMLVPTAVWSGGHDWLADVYDVNILLTQITNLVFHESIPEWEHLDFIWGLDAPWRLYNKIINLMRKYQ

SEQ ID NO: 82 - protein, 1124 aa, Homo sapiens
MAPPSEETPLIPQRSCSLLSTEAGALHVLLPARGPGPPQRLSFSFGDHLAEDLCVQAAKASGILPVYHSLFALATEDLSCWFPPSHIFSVEDASTQVLLYRIRFYFPNWFGLEKCHRFGLRKDLASAILDLPVLEHLFAQHRSDLVSGRLPVGLSLKEQGECLSLAVLDLARMAREQAQRPGELLKTVSYKACLPPSLRDLIQGLSFVTRRRIRRTVRRALRRVAACQADRHSLMAKYIMDLERLDPAGAAETFHVGLPGALGGHDGLGLLRVAGDGGIAWTQGEQEVLQPFCDFPEIVDISIKQAPRVGPAGEHRLVTVTRTDNQILEAEFPGLPEALSFVALVDGYFRLTTDSQHFFCKEVAPPRLLEEVAEQCHGPITLDFAINKLKTGGSRPGSYVLRRSPQDFDSFLLTVCVQNPLGPDYKGCLIRRSPTGTFLLVGLSRPHSSLRELLATCWDGGLHVDGVAVTLTSCCIPRPKEKSNLIVVQRGHSPPTSSLVQPQSQYQLSQMTFHKIPADSLEWHENLGHGSFTKIYRGCRHEVVDGEARKTEVLLKVMDAKHKNCMESFLEAASLMSQVSYRHLVLLHGVCMAGDSTMVQEFVHLGAIDMYLRKRGHLVPASWKLQVVKQLAYALNYLEDKGLPHGNVSARKVLLAREGADGSPPFIKLSDPGVSPAVLSLEMLTDRIPWVAPECLREAQTLSLEADKWGFGATVWEVFSGVTMPISALDPAKKLQFYEDRQQLPAPKWTELALLIQQCMAYEPVQRPSFRAVIRDLNSLISSDYELLSDPTPGALAPRDGLWNGAQLYACQDPTIFEERHLKYISQLGKGNFGSVELCRYDPLGDNTGALVAVKQLQHSGPDQQRDFQREIQILKALHSDFIVKYRGVSYGPGRQSLRLVMEYLPSGCLRDFLQRHRARLDASRLLLYSSQICKGMEYLGSRRCVHRDLAARNILVESEAHVKIADFGLAKLLPLDKDYYVVREPGQSPIFWYAPESLSDNIFSRQSDVWSFGVVLYELFTYCDKSCSPSAEFLRMMGCERDVPALCRLLELLEEGQRLPAPPACPAEVHELMKLCWAPSPQDRPSFSALGPQLDMLWSGSRGCETHAFTAHPEGKHHSLSFS

SEQ ID NO: 83 - protein, 2647 aa, Homo sapiens
MSSSHSRAGQSAAGAAPGGGVDTRDAEMPATEKDLAEDAPWKKIQQNTFTRWCNEHLKCVSKRIANLQTDLSDGLRLIALLEVLSQKKMHRKHNQRPTFRQMQLENVSVALEFLDRESIKLVSIDSKAIVDGNLKLILGLIWTLILHYSISMPMWDEEEDEEAKKQTPKQRLLGWIQNKLPQLPITNFSRDWQSGRALGALVDSCAPGLCPDWDSWDASKPVTNAREAMQQADDWLGIPQVITPEEIVDPNVDEHSVMTYLSQFPKAKLKPGAPLRPKLNPKKARAYGPGIEPTGNMVKKRAEFTVETRSAGQGEVLVYVEDPAGHQEEAKVTANNDKNRTFSVWYVPEVTGTHKVTVLFAGQHIAKSPFEVYVDKSQGDASKVTAQGPGLEPSGNIANKTTYFEIFTAGAGTGEVEVVIQDPMGQKGTVEPQLEARGDSTYRCSYQPTMEGVHTVHVTFAGVPIPRSPYTVTVGQACNPSACRAVGRGLQPKGVRVKETADFKVYTKGAGSGELKVTVKGPKGEERVKQKDLGDGVYGFEYYPMVPGTYIVTITWGGQNIGRSPFEVKVGTECGNQKVRAWGPGLEGGVVGKSADFVVEAIGDDVGTLGFSVEGPSQAKIECDDKGDGSCDVRYWPQEAGEYAVHVLCNSEDIRLSPFMADIRDAPQDFHPDRVKARGPGLEKTGVAVNKPAEFTVDAKHGGKAPLRVQVQDNEGCPVEALVKDNGNGTYSCSYVPRKPVKHTAMVSWGGVSIPNSPFRVNVGAGSHPNKVKVYGPGVAKTGLKAHEPTYFTVDCAEAGQGDVSIGIKCAPGVVGPAEADIDFDIIRNDNDTFTVKYTPRGAGSYTIMVLFADQATPTSPIRVKVEPSHDASKVKAEGPGLSRTGVELGKPTHFTVNAKAAGKGKLDVQFSGLTKGDAVRDVDIIDHHDNTYTVKYTPVQQGPVGVNVTYGGDPIPKSPFSVAVSPSLDLSKIKVSGLGEKVDVGKDQEFTVKSKGAGGQGKVASKIVGPSGAAVPCKVEPGLGADNSVVRFLPREEGPYEVEVTYDGVPVPGSPFPLEAVAPTKPSKVKAFGPGLQGGSAGSPARFTIDTKGAGTGGLGLTVEGPCEAQLECLDNGDGTCSVSYVPTEPGDYNINILFADTHIPGSPFKAHVVPCFDASKVKCSGPGLERATAGEVGQFQVDCSSAGSAELTIEICSEAGLPAEVYIQDHGDGTHTITYIPLCPGAYTVTIKYGGQPVPNFPSKLQVEPAVDTSGVQCYGPGIEGQGVFREATTEFSVDARALTQTGGPHVKARVANPSGNLTETYVQDRGDGMYKVEYTPYEEGLHSVDVTYDGSPVPSSPFQVPVTEGCDPSRVRVHGPGIQSGTTNKPNKFTVETRGAGTGGLGLAVEGPSEAKMSCMDNKDGSCSVEYIPYEAGTYSLNVTYGGHQVPGSPFKVPVHDVTDASKVKCSGPGLSPGMVRANLPQSFQVDTSKAGVAPLQVKVQGPKGLVEPVDVVDNADGTQTVNYVPSREGPYSISVLYGDEEVPRSPFKVKVLPTHDASKVKASGPGLNTTGVPASLPVEFTIDAKDAGEGLLAVQITDPEGKPKKTHIQDNHDGTYTVAYVPDVTGRYTILIKYGGDEIPFSPYRVRAVPTGDASKCTVTVSIGGHGLGAGIGPTIQIGEETVITVDTKAAGKGKVTCTVCTPDGSEVDVDVVENEDGTFDIFYTAPQPGKYVICVRFGGEHVPNSPFQVTALAGDQPSVQPPLRSQQLAPQYTYAQGGQQTWAPERPLVGVNGLDVTSLRPFDLVIPFTIKKGEITGEVRMPSGKVAQPTITDNKDGTVTVRYAPSEAGLHEMDIRYDNMHIPGSPLQFYVDYVNCGHVTAYGPGLTHGVVNKPATFTVNTKDAGEGGLSLAIEGPSKAEISCTDNQDGTCSVSYLPVLPGDYSILVKYNEQHVPGSPFTARVTGDDSMRMSHLKVGSAADIPINISETDLSLLTATVVPPSGREEPCLLKRLRNGHVGISFVPKETGEHLVHVKKNGQHVASSPIPVVISQSEIGDASRVRVSGQGLHEGHTFEPAEFIIDTRDAGYGGLSLSIEGPSKVDINTEDLEDGTCRVTYCPTEPGNYIINIKFADQHVPGSPFSVKVTGEGRVKESITRRRRAPSVANVGSHCDLSLKIPEISIQDMTAQVTSPSGKTHEAEIVEGENHTYCIRFVPAEMGTHTVSVKYKGQHVPGSPFQFTVGPLGEGGAHKVRAGGPGLERAEAGVPAEFSIWTREAGAGGLAIAVEGPSKAEISFEDRKDGSCGVAYVVQEPGDYEVSVKFNEEHIPDSPFVVPVASPSGDARRLTVSSLQESGLKVNQPASFAVSLNGAKGAIDAKVHSPSGALEECYVTEIDQDKYAVRFIPRENGVYLIDVKFNGTHIPGSPFKIRVGEPGHGGDPGLVSAYGAGLEGGVTGNPAEFVVNTSNAGAGALSVTIDGPSKVKMDCQECPEGYRVTYTPMAPGSYLISIKYGGPYHIGGSPFKAKVTGPRLVSNHSLHETSSVFVDSLTKATCAPQHGAPGPGPADASKVVAKGLGLSKAYVGQKSSFTVDCSKAGNNMLLVGVHGPRTPCEEILVKHVGSRLYSVSYLLKDKGEYTLVVKWGHEHIPGSPYRVVVP

SEQ ID NO: 84 - protein, 481 aa, Homo sapiens
MNEVSVIKEGWLHKRGEYIKTWRPRYFLLKSDGSFIGYKERPEAPDQTLPPLNNFSVAECQLMKTERPRPNTFVIRCLQWTTVIERTFHVDSPDEREEWMRAIQMVANSLKQRAPGEDPMDYKCGSPSDSSTTEEMEVAVSKARAKVTMNDFDYLKLLGKGTFGKVILVREKATGRYYAMKILRKEVIIAKDEVAHTVTESRVLQNTRHPFLTALKYAFQTHDRLCFVMEYANGGELFFHLSRERVFTEERARFYGAEIVSALEYLHSRDVVYRDIKLENLMLDKDGHIKITDFGLCKEGISDGATMKTFCGTPEYLAPEVLEDNDYGRAVDWWGLGVVMYEMMCGRLPFYNQDHERLFELILMEEIRFPRTLSPEAKSLLAGLLKKDPKQRLGGGPSDAKEVMEHRFFLSINWQDVVQKKLLPPFKPQVTSEVDTRYFDDEFTAQSITITPPDRYDSLGLLELDQRTHFPQFSYSASIRE

SEQ ID NO: 85 - protein, 435 aa, Homo sapiens
MEMEKEFEQIDKSGSWAAIYQDIRHEASDFPCRVAKLPKNKNRNRYRDVSPFDHSRIKLHQEDNDYINASLIKMEEAQRSYILTQGPLPNTCGHFWEMVWEQKSRGVVMLNRVMEKGSLKCAQYWPQKEEKEMIFEDTNLKLTLISEDIKSYYTVRQLELENLTTQETREILHFHYTTWPDFGVPESPASFLNFLFKVRESGSLSPEHGPVVVHCSAGIGRSGTFCLADTCLLLMDKRKDPSSVDIKKVLLEMRKFRMGLIQTADQLRFSYLAVIEGAKFIMGDSSVQDQWKELSHEDLEPPPEHIPPPPRPPKRILEPHNGKCREFFPNHQWVKEETQEDKDCPIKEEKGSPLNAAPYGIESMSQDTEVRSRVVGGSLRGAQAASPAKGEPSLPEKDEDHALSYWKPFLVNMCVATVLTAGAYLCYRFLFNSNT

SEQ ID NO: 86 - protein, 221 aa, Homo sapiens
MSDGDYDYLIKFLALGDSGVGKTSVLYQYTDGKFNSKFITTVGIDFREKRVVYRASGPDGATGRGQRIHLQLWDTAGQERFRSLTTAFFRDAMGFLLLFDLTNEQSFLNVRNWISQLQMHAYCENPDIVLCGNKSDLEDQRVVKEEEAIALAEKYGIPYFETSAANGTNISQAIEMLLDLIMKRMERCVDKSWIPEGVVRSNGHASTDQLSEEKEKGACGC

SEQ ID NO: 87 - protein, 821 aa, Homo sapiens
MPTVISASVAPRTAAEPRSPGPVPHPAQSKATEAGGGNPSGIYSAIISRNFPIIGVKEKTFEQLHKKCLEKKVLYVDPEFPPDETSLFYSQKFPIQFVWKRPPEICENPRFIIDGANRTDICQGELGDCWFLAAIACLTLNQHLLFRVIPHDQSFIENYAGIFHFQFWRYGEWVDVVIDDCLPTYNNQLVFTKSNHRNEFWSALLEKAYAKLHGSYEALKGGNTTEAMEDFTGGVAEFFEIRDAPSDMYKIMKKAIERGSLMGCSIDDGTNMTYGTSPSGLNMGELIARMVRNMDNSLLQDSDLDPRGSDERPTRTIIPVQYETRMACGLVRGHAYSVTGLDEVPFKGEKVKLVRLRNPWGQVEWNGSWSDRWKDWSFVDKDEKARLQHQVTEDGEFWMSYEDFIYHFTKLEICNLTADALQSDKLQTWTVSVNEGRWVRGCSAGGCRNFPDTFWTNPQYRLKLLEEDDDPDDSEVICSFLVALMQKNRRKDRKLGASLFTIGFAIYEVPKEMHGNKQHLQKDFFLYNASKARSKTYINMREVSQRFRLPPSEYVIVPSTYEPHQEGEFILRVFSEKRNLSEEVENTISVDRPVKKKKTKPIIFVSDRANSNKELGVDQESEEGKGKTSPDKQKQSPQPQPGSSDQESEEQQQFRNIFKQIAGDDMEICADELKKVLNTVVNKHKDLKTHGFTLESCRSMIALMDTDGSGKLNLQEFHHLWNKIKAWQKIFKHYDTDQSGTINSYEMRNAVNDAGFHLNNQLYDIITMRYADKHMNIDFDSFICCFVRLEGMFRAFHAFDKDGDGIIKLNVLEWLQLTMYA

SEQ ID NO: 88 - DNA, 2024 bp, Homo sapiens
actgtctcggtatcaccaaacccttgcaggctcttatgggcatgaaacactcctcccgctgcctgctcctgaggaggaaaatggcggagaacgcggccgagagcaccgaggtgaacagccccccctcccagcccccccagcccgtcgtccctgctaagcccgtgcaatgcgtccatcatgtgtccactcaacccagctgcccaggacggggcaagatgtccaagctgctgaacccagaggagatgacctcgagagattattacttcgactcctatgcccactttgggatccacgaggaaatgctgaaggatgaggtgcggactctcacttaccggaactccatgtaccacaacaagcacgtgttcaaggacaaagtggtactggatgtggggagtggtactgggatcctttccatgttcgctgccaaggcaggggccaagaaggtgtttgggatcgaatgctccagtatttctgactactcacagaagatcattaaggccaaccacttggacaacatcatcaccatatttaagggtaaagtggaagaggtggagctgcctgtggagaaggtggacatcatcatcagcgagtggatgggctactgtctgttctatgagtccatgctcaacacggtgatctttgccagggacaagtggctgaaacctggagggcttatgtttccagaccgggcagctttgtacgtggtagcgattgaagacagacagtacaaggacttcaaaatccactggtgggagaatgtctatggctttgacatgacctgcatcagggacgtggccatgaaggagcctctagtggacatcgtggatccaaagcaagtggtgaccaatgcctgtttgataaaggaggtggacatttacacagtgaagacggaagagctatcgttcacatctgcattctgcctgcagatacagcgcaacgactacgtccacgccctggtcacctattttaatattgaatttaccaagtgccacaagaaaatggggttttccacagcccctgatgctccctacacccactggaagcagaccgtcttctacttggaagattacctcactgtccggaggggggaggaaatctacgggaccatatccatgaagccaaatgccaaaaatgtgcgagacctcgatttcacagtagacttggattttaagggacagctgtgtgaaacatctgtatctaatgactacaaaatgcgttagcacacgtgggaagctgcagagagcaacgagaaaaggaactctcacctcgatctgccgtgccgtcccaaagaataccgtttgcaggactacacacttgaaaaccagagttttcaactctgccttgaagattggtgaactccccagggctccagtgggctctgccactggacagaaggcctccagctcctccgctctgccctggtagcccttcacgaaggctttgtgttgccaacaaagagcgacctggcgtgctgtggctgggccccgagggtggaaacgtattcgcgtctccccgtctcctccttaactgtgactctccgggtcttctgagttttgcatgctgcgggtgtctaggacagattgcttccactagaacctggagacatagcatctttgatagcataagccagattatctgtgtgtgcggtggtgtgcgtgtgcgtgcatgtgtgaatgtgagcagcatagttgatatttacccacaaacacctgtatatgcgtgcatatacaaccaagtgggtagacctaggtgttctctcagaggggtgtgtgtgtgtgtgcgtgcgcgtgtgcctagaatatatattactctcagaggagattctgttgcttttgaataggaatttgttttgtgattagttcgccccttccccaccccttaccagatgttaagcagctatgaaacattctctgtactagttctggtctccttttgactggactgtggctctgaaccttgagcatagtaccacggactccgtgggcgctcaataaacacacatgagaacaaaaaaaaaaaaaaaa

SEQ ID NO: 89 - DNA, 2367 bp, Homo sapiens
aataggaaagctgcaaaacactgtggagtgctcccgtgtaaataaaaagaggaaaaaagtttctcaagtcgccgctgcacgacgtctggccggcgctggagcgggggtctgcgctctcccgagcggccgcgcgctggactttattgtgccgcaaccagccccagttcccattgtttgtgtttttttcaaaatatggcaaaggttcaggtgaacaatgtagtggtgctggataacccttctcctttctacaacccgttccagttcgagatcaccttcgagtgcatcgaggacctgtctgaagacttggaatggaaaattatctatgtgggctctgcagaaagtgaagaatacgatcaagttttagactctgttttagtgggtcctgttcccgcaggaaggcatatgtttgtatttcaggctgatgcacctaatccaggactcattccagatgcagatgcagtaggcgtaactgttgtgctaattacttgtacctatcgaggacaagaatttattagagttggctattatgtaaataatgaatatactgagacagaattaagggaaaatccaccagtaaaaccagacttttctaagcttcaaaggaatattttggcatctaatcccagggtcacaagattccacattaattgggaagataacacagaaaaactggaagatgcagagagcagtaatccaaatctacagtcacttctttcaacagatgcattaccttcagcatcaaagggatggtccacatcagaaaactcactaaatgtcatgttagaatcccacatggactgcatgtgaccacctaccatccctttagtacaaattaagctattaaaaatacacagaactatttccctgaattccgtaagtacatagtcaaaacacaatgtgaagaatttgtttaaaaacatcctgtagaaagtttataagaaaaccagtatttgaacaaattgtggaatataaatacaactatttttaagtaatttttttctctaatgtgttattttatttgttctgaaactaatctgattaaagcatatatattattttcttctcctttatatgtaatgaaagcacttataaagaaacaggaatcattagaccaggttgtaaagatgtcttggcctcccagacagtctttggaccactattttactggcctttgaaagaacaaagtttacttcaactaaaatgtttcttcctgtgaagacatatggtatcattttaatttaaggggcagatttccattcttttttggcatgtccttaaaaagaggatttgaaatcaactatatgctaccaagaactttaggatccaattttccaagccaccgtgaagcctcttatggctactattatagttcatgagatgttggacagcatttggtttgtttggtaagagaagaacaaatatggctaattgttaataaggtcccctggctatggtttttgttcttataacagagtttagaatatcagagcatttcttgaatcatacatcattattgtccagtgaattcaagaccgaatacaatatcgggagaaaatacaaactccctgtgtttaagaataggggattataatggctcaaattggttcatttgatttctaaaaataccatgacctttaaaaattcttttaatagatcatgttattggcagtatttatataaaaaccatggatttagaaaggtatatttagctttattataatagatacgttactattttggaaatatatatattttcacacctgtagtactcttccccatttcctctgacactcatgcagaatgagatcaggcatatttgtggttgacatactctagatagcttttccaacaaatctttgaaaagcaatcttggaaaggaattcattaactaaatggggtaaaaggtttctttttctttgagagttaagtccttcctcaaaaaattttcttatgctccataaaattgaggtagaatactttcattattcttgcagctaagcaagacagccatatgatgcaggttatgcagtgccttcatatctaaaacttttatactgcactttttaaagcttttatgttgaggaaaggaaaagggcatttgtctaaacatggattctgagttgtatatatttcctatcattctaaaaaagtgaatttgtgaagcaaagttttgccagatgttaaactttgaatttaatataccagattattaaaatattgtccattaactagttcatagattttaaaagtaaaatacttctgactgttaaaactatataaagaaaatctcatttgtctaattgcaattaaaagaaaaatgttaaaatattaaaatgaaaataaaagcattactttccaaaaaaaaaa

SEQ ID NO: 90 - DNA, 2769 bp, Homo sapiens
gcagagctgcgcgcgcactcgggaaaggggggaagggagcagggtccaggcagggggggttaggccccctgatccccctcgttaccccgactggcacggaataaggggaggaaatgatcgagatggcggcggagaaggagccgtttctggtgccggccccgccgccgccgctcaaagatgagtcgggcggagggggcggccccacggtgccaccgcaccaagaggccgcctctggggagctccgcggcgggacggagcgtggtccgggtcgttgcgcgccatctgcggggtccccagccgctgcggtcggtcgggaaagccccggggccgcggccacctcctccagtggtccccaggcgcagcagcaccgagggggcggcccccaggcgcagtcgcatggggaggcccgcctgtcggatcccccggggcgagccgctcccccggacgtgggggaggagcgccggggagggggcgggacagagctgggtccccctgctcctcctcgaccccgcaatggctatcagccccaccggccacctggggggggcgggggcaagaggagaaatagctgtaatgtagggggaggcgggggaggcttcaaacatccggccttcaagaggcgcaggcgggtgaattcggactgtgactctgtgttaccctccaacttcctcctggggggcaatatctttgatcccctgaacctgaatagcctcctggatgaggaagtgagccgcactctcaacgcggagacccctaagtcatccccccttccggccaaagggcgagatccggtggagatcctcatccccaaagatattactgacccgctcagtctcaatacttgcactgatgagggccatgtagttcttgcttcgccactcaagactggtcggaagcggcatagacaccggggacagcaccaccagcagcagcaggcagccggagggagtgagagtcaccccgtgccgcccacagcccctctcacccccttactccacggggagggcgcctcacagcagccgcggcacaggggccagaaccgggatgccccccaaccctatgaactcaacacagccatcaactgcagggatgaagtggtgtctccccttccatctgctctgcagggtccctcaggctccctatcagcccctccagctgcctcagttatctctgcacccccatcttcctcctcccgacatcgcaaacgtcgcaggacttccagcaagtcggaggcaggggctaggggtggaggccagggttccaaggaaaagggccgagggagttggggaggccgccaccaccaccaccacccactgcctgcagcaggcttcaaaaagcaacagcgcaagttccagtatgggaattattgcaaatactatgggtaccgcaatccttcctgtgaggatgggcgccttcgggtgttgaagcctgagtggtttcggggccgggacgtcctagatctgggctgcaatgtgggccatctgaccctgagcattgcctgcaagtggggcccgtcccgcatggtgggcctggatatcgattcccggctcatccattctgcccgccaaaacatccgacactacctttccgaggagctgcgtctcccaccccagactttggaaggggacccgggggcagagggtgaggaagggaccaccaccgttcgaaagaggagctgcttcccagcctcgctgactgccagccggggtcccatcgctgccccccaagtgcccttggatggagcggacacatcagtcttccccaacaatgttgtcttcgtcacgggtaattatgtgctggatcgagatgacctggtggaggcccaaacacctgagtatgatgtggtgctctgcctcagcctcaccaagtgggtgcatctgaactggggagacgagggcctgaagcgcatgtttcgccggatctaccggcacctacgccctgggggcatcctggtcctagagccccaaccctggtcgtcgtatggcaagagaaagactcttacagaaacgatctacaagaactactaccgaatccaattgaagccagagcagttcagttcctacctgacatccccagacgtgggcttctccagctatgagcttgtggccacaccccacaacacctctaaaggcttccagcgtcctgtgtacctgttccacaaggcccgatcccccagccactaagtggccccctaaacagaaagtgtgaagaggctgccctcgctgctcataaggacctgggggaagaggaaagtgtcccaaggtctttcctttctgactccaaaaatagtttcctttcttggatctgcaaagaaagcttttcttccgtcgctgcctcagcctcctccctatgcctctggcacctgcgcagcaaggctggctgtgctggagtcaccatcatcttcctctcccccagcctcccaggctggatggcatggactgtttgctgacctctgttctcttagggcatgggaggtgggaggatatcaaattctctagccctttcctcctattctcccaaggagagagattcccatttctcctcggccattgtacctagctcttgtccctagctgcatttcagtggaccatggatagagggactgagggttagacggggaagactggcagggaggcacgcaggtactgtgaaaatccttccctttgccctcccccagtgggagagggggttgggttttcaatgtgagaacagcacaataaacttgatgtctagggcagtggcccccaaaaaaaaaaaaaaaaaaaaaaa

SEQ ID NO: 91 - DNA, 3509 bp, Homo sapiens
cctgcggctggggctgggggcggcggcggcggcgacggggcggcgggcggcgcggggcggtccggcgggttcaaagaggaaaacatggcggaaaacaaaggcggcggcgaggctgagagcggcggcgggggcagcggcagcgcgccggtaactgccggggccgccgggcccgccgcgcaggaggcggagccgcctctcaccgcggtgctggtggaggaggaggaggaggaaggcggcagggccggcgctgagggcggcgcggccgggcccgacgacgggggggtggccgcggcctcctcgggctcggcccaggctgcttcatctcctgcggcctcagtgggcactggagttgccgggggcgcagtatcgacgccggctccagctccagcctcggctcccgctccgggtccctcggcagggccgcctcctggaccgccagcctcgctcctggacacctgcgccgtgtgtcagcagagcttgcagagccggcgtgaggcggagcccaagctgctgccctgtcttcactccttctgcctgcgctgcctgcccgagccggagcgccagctcagcgtgcccatcccggggggcagcaacggcgacatccagcaagttggtgtaatacggtgcccagtatgccgccaagaatgcagacagatagaccttgtggataattattttgtgaaagacacatctgaagctcctagcagttctgatgaaaaatcagaacaggtatgtactagttgtgaagacaatgcaagtgcagttggcttttgtgtagaatgtggagagtggctatgtaagacatgtatcgaagcacatcaaagagtaaaatttactaaagatcacttgatcaggaagaaagaagatgtctcagagtctgttggagcatctggtcaacgccctgttttctgccctgtacacaaacaagaacagttgaaacttttctgtgaaacatgtgatagattgacatgtagagactgtcagctattggaacacaaagaacataggtatcagtttttggaagaagcttttcaaaatcagaagggtgcaattgagaatctactggcgaaacttcttgagaagaagaattatgttcattttgcagctactcaggtgcagaataggataaaagaagtaaatgagactaacaaacgtgtagaacaggaaattaaagtggccattttcacccttatcaatgaaattaataagaaaggaaaatctctcttacaacagctagagaatgttacaaaggaaagacagatgaagttactacagcagcagaatgacatcacaggcctttcccggcaggtgaagcatgttatgaacttcacaaattgggcaattgcaagtggcagcagcacagcactactatacagcaagcgactgattactttccagttgcgtcatattttgaaagcacggtgtgatcctgtccctgctgctaatggagcaatacgtttccattgtgatcccaccttctgggcaaagaatgtagtcaatttaggtaatctagtaatagagagtaaaccagctcctggttatactcctaatgttgtagttgggcaagttcctccagggacaaaccacattagtaaaacccctggacagattaacttagcacagcttcgactccagcacatgcaacaacaagtatatgcacagaaacatcagcagttgcaacagatgaggatgcagcaaccaccagcacctgtaccaactacaacaacaacaacacaacagcatcctagacaagcagcccctcagatgttacaacaacagcctcctcgattgatcagtgtgcaaacaatgcaaagaggcaacatgaactgtggagcttttcaagcccatcagatgagactggctcagaatgctgccagaataccagggatacccaggcacagcggccctcaatattccatgatgcagccacacctccaaagacaacactcaaacccagggcatgctggaccctttcccgtagtatcggtacacaacaccacaatcaacccaacgagccctactacagcaactatggcaaatgcaaaccgaggtcccaccagcccatctgttacagcaatagagctaatcccctcagttaccaatccagaaaaccttccatcgctgccagatattccacccatacagttggaagatgctggctcaagtagtttagataatctactaagtagatacatctcaggcagtcacctacccccacagcctacaagcaccatgaatccttctccaggtccctctgccctttctccgggatcatcaggtttatccaattctcacacacctgtgagacccccaagtacttctagtactggcagtcgaggcagctgtgggtcatcaggaagaactgctgagaagacaagtcttagtttcaaatctgatcaggtgaaggtcaagcaagaacctgggactgaagatgaaatatgtagcttttcaggaggtgtaaaacaagaaaaaacagaggatggcaggaggagtgcttgcatgttgagcagtcctgagagtagcttgacaccacctctctcaaccaacctgcatctagaaagtgaattggatgcattggcaagcctggaaaaccatgtgaaaactgaacctgcagatatgaatgaaagctgcaaacagtcagggctcagcagccttgttaatggaaagtccccaattcgaagcctcatgcacaggtcggcaaggattggaggagatggcaacaataaagatgatgacccaaatgaagactggtgtgctgtctgccaaaacggaggagatctcttgtgctgcgaaaaatgtccaaaggtctttcatctaacttgtcatgttccaacactacttagctttccaagtggggactggatatgcacattttgtagagatattggaaagccagaagttgaatatgattgtgataatttgcaacatagtaagaaggggaaaactgcgcaggggttaagccccgtggaccaaaggaaatgtgaacgtcttctgctttacctctattgccatgaattaagtattgaattccaggagcctgttcctgcttcgataccaaactactataaaattataaagaaaccaatggatttatccaccgtgaaaaagaagcttcagaaaaaacattcccaacactaccaaatcccggatgactttgtggccgatgtccgtttgatcttcaagaactgtgaaaggtttaatgaaatgatgaaagttgttcaagtttatgcagacacacaagagattaatttgaaggctgattcagaagtagctcaggcagggaaagcagttgcattgtactttgaagataaactcacagagatctactcagacaggaccttcgcacctttgccagagtttgagcaggaagaggatgatggtgaggtaactgaggactctgatgaagactttatacagccccgcagaaaacgcctaaagtcagatgagagaccagtacatataaagtaaaatgacatggatttaaatgaattgtttaaaaaaaaaaaaaa

SEQ ID NO: 92 - DNA, 2314 bp, Homo sapiens
cgcgcgcacagagcgagctcttgcagcctccccgcccctcccgcaacgctcgaccccaggattcccccggctcgcctgcccgccatggccgacaaggaagcagccttcgacgacgcagtggaagaacgagtgatcaacgaggaatacaaaatatggaaaaagaacaccccttttctttatgatttggtgatgacccatgctctggagtggcccagcctaactgcccagtggcttccagatgtaaccagaccagaagggaaagatttcagcattcatcgacttgtcctggggacacacacatcggatgaacaaaaccatcttgttatagccagtgtgcagctccctaatgatgatgctcagtttgatgcgtcacactacgacagtgagaaaggagaatttggaggttttggttcagttagtggaaaaattgaaatagaaatcaagatcaaccatgaaggagaagtaaacagggcccgttatatgccccagaacccttgtatcatcgcaacaaagactccttccagtgatgttcttgtctttgactatacaaaacatccttctaaaccagatccttctggagagtgcaacccagacttgcgtctccgtggacatcagaaggaaggctatgggctttcttggaacccaaatctcagtgggcacttacttagtgcttcagatgaccataccatctgcctgtgggacatcagtgccgttccaaaggagggaaaagtggtagatgcgaagaccatctttacagggcatacggcagtagtagaagatgtttcctggcatctactccatgagtctctgtttgggtcagttgctgatgatcagaaacttatgatttgggatactcgttcaaacaatacttccaaaccaagccactcagttgatgctcacactgctgaagtgaactgcctttctttcaatccttatagtgagttcattcttgccacaggatcagctgacaagactgttgccttgtgggatctgagaaatctgaaacttaagttgcattcctttgagtcacataaggatgaaatattccaggttcagtggtcacctcacaatgagactattttagcttccagtggtactgatcgcagactgaatgtctgggatttaagtaaaattggagaggaacaatccccagaagatgcagaagacgggccaccagagttgttgtttattcatggtggtcatactgccaagatatctgatttctcctggaatcccaatgaaccttgggtgatttgttctgtatcagaagacaatatcatgcaagtgtggcaaatggcagagaacatttataatgatgaagaccctgaaggaagcgtggatccagaaggacaagggtcctagatatgtctttacttgttgtgattttagactccccttttttcttctcaaccctgagagtgatttaacactggttttgagacagactttattcagctatccctctatataataggtaccaccgataatgctattagcccaaaccgtgggtttttctaaatattaataggggggcttgattcaacaaagccacagacttaacgttgaaattttcttcaggaattttctagtaacccaggtctaaagtagctacagaaaggggaatattatgtgtgattatttttcttcttatgctatatccccaagtttttcagactcatttaagtaaaggctagagtgagtaaggaatagagccaaatgaggtaggtgtctgagccatgaagtataaatactgaaagatgtcacttttattcaggaaatagggggagttcaagtcgtatagattcctactcgaaaatcttgacacctgactttccaggatgcacattttcatacgtagaccagtttcctcttggtttcttcagttaagtcaaaacaacacgttcctctttccccatatattcatatatttttgctcgttagtgtatttcttgagctgttttcatgttgtttatttcctgtctgtgaaatggtgtttttttttttgttgttggttttttttttttttttttaacttgggaccaccaagttgtaaagatgtatgtttttacctgacagttataccacaggtagactgtcaagttgagaagagtgaatcaataacttgtatttgttttaaaaattaaattaatccttgataagagttgctttttttttttaggagttagtccttgaccactagtttgatgccatctccattttgggtgacctgtttcaccagcaggcctgttactctccatgactaactgtgtaagtgcttaaaatggaataaattgcttttctacataaaaaaaaa

SEQ ID NO: 93 - DNA, 1725 bp, Homo sapiens
gctcgcgcaggagaccccgggtgacggggcccggcgccgctaactggagcgaaccccagcgtccgccgacatggcctggaccaagtaccagctgttcctggccgggctcatgcttgttaccggctccatcaacacgctctcggcaaaatgggcggacaatttcatggccgagggctgtggagggagcaaggagcacagcttccagcatcccttcctccaggcagtgggcatgttcctgggagaattctcctgcctggctgccttctacctcctccgatgcagagctgcagggcaatcagactccagcgtagacccccagcagcccttcaaccctcttcttttcctgcccccagcgctctgtgacatgacagggaccagcctcatgtatgtggctctgaacatgaccagtgcctccagcttccagatgctgcggggtgcagtgatcatattcactggcctgttctcggtggccttcctgggccggaggctggtgctgagccagtggctgggcatcctagccaccatcgcggggctggtggtcgtgggcctggctgacctcctgagcaagcacgacagtcagcacaagctcagcgaagtgatcacaggggacctgttgatcatcatggcccagatcatcgttgccatccagatggtgctagaggagaagttcgtctacaaacacaatgtgcacccactgcgggcagttggcactgagggcctctttggctttgtgatcctctccctgctgctggtgcccatgtactacatccccgccggctccttcagcggaaaccctcgtgggacactggaggatgcattggacgccttctgccaggtgggccagcagccgctcattgccgtggcactgctgggcaacatcagcagcattgccttcttcaacttcgcaggcatcagcgtcaccaaggaactgagcgccaccacccgcatggtgttggacagcttgcgcaccgttgtcatctgggcactgagcctggcactgggctgggaggccttccatgcactgcagatccttggcttcctcatactccttataggcactgccctctacaatgggctacaccgtccgctgctgggccgcctgtccaggggccggcccctggcagaggagagcgagcaggagagactgctgggtggcacccgcactcccatcaatgatgccagctgaggttccctggaggcttctactgccacccgggtgctccttctccctgagactgaggccacacaggctggtgggccccgaatgccctatccccaaggcctcaccctgtcccctccctgcagaacccccagggcagctgctgccacagaagataacaacacccaagtcctctttttctcactaccacctgcagggtggtgttacccagcccccacaagcctgagtgcagtggcacgatctcggcggctcactacaacctctgcctcaagcgatcctcccatctcagcctcccaaagtgctgggattacagacctgagccaccacacctgggcaacagagtgaaacctgtccctgttttcctgctcttactctcacctccgaggcctcctctgcctggaagagattacagggaaattccaggcaaaaaaaaaaaaaaaaaaaaaaaaaaaaaaaaaaaaaaaaaaaaaaaaaaaaaaaaaaaaaaaaaaaaaaaaaaaaaaaaaaaaaaaaaaaaaaaaaaaaaaaaaaaaaaaaaaaaaaaa

SEQ ID NO: 94 - DNA, 2325 bp, Homo sapiens
acctcattcatttctaccggtctctagtagtgcagcttcggctggtgtcatcggtgtccttcctccgctgccgcccccgcaaggcttcgccgtcatcgaggccatttccagcgacttgtcgcacgcttttctatatacttcgttccccgccaaccgcaaccattgacgccatgtcgggttattcgagtgaccgagaccgcggccgggaccgagggtttggtgcacctcgatttggaggaagtagggcagggcccttatctggaaagaagtttggaaaccctggggagaaattagttaaaaagaagtggaatcttgatgagctgcctaaatttgagaagaatttttatcaagagcaccctgatttggctaggcgcacagcacaagaggtggaaacatacagaagaagcaaggaaattacagttagaggtcacaactgcccgaagccagttctaaatttttatgaagccaatttccctgcaaatgtcatggatgttattgcaagacagaatttcactgaacccactgctattcaagctcagggatggccagttgctctaagtggattggatatggttggagtggcacagactggatctgggaaaacattgtcttatttgcttcctgccattgtccacatcaatcatcagccattcctagagagaggcgatgggcctatttgtttggtgctggcaccaactcgggaactggcccaacaggtgcagcaagtagctgctgaatattgtagagcatgtcgcttgaagtctacttgtatctacggtggtgctcctaagggaccacaaatacgtgatttggagagaggtgtggaaatctgtattgcaacacctggaagactgattgactttttagagtgtggaaaaaccaatctgagaagaacaacctaccttgtccttgatgaagcagatagaatgcttgatatgggctttgaaccccaaataaggaagattgtggatcaaataagacctgataggcaaactctaatgtggagtgcgacttggccaaaagaagtaagacagcttgctgaagatttcctgaaagactatattcatataaacattggtgcacttgaactgagtgcaaaccacaacattcttcagattgtggatgtgtgtcatgacgtagaaaaggatgaaaaacttattcgtctaatggaagagatcatgagtgagaaggagaataaaaccattgtttttgtggaaaccaaaagaagatgtgatgagcttaccagaaaaatgaggagagatgggtggcctgccatgggtatccatggtgacaagagtcaacaagagcgtgactgggttctaaatgaattcaaacatggaaaagctcctattctgattgctacagatgtggcctccagagggctagatgtggaagatgtgaaatttgtcatcaattatgactaccctaactcctcagaggattatattcatcgaattggaagaactgctcgcagtaccaaaacaggcacagcatacactttctttacacctaataacataaagcaagtgagcgaccttatctctgtgcttcgtgaagctaatcaagcaattaatcccaagttgcttcagttggtcgaagacagaggttcaggtcgttccaggggtagaggaggcatgaaggatgaccgtcgggacagatactctgcgggcaaaaggggtggatttaatacctttagagacagggaaaattatgacagaggttactctagcctgcttaaaagagattttggggcaaaaactcagaatggtgtttacagtgctgcaaattacaccaatgggagctttggaagtaattttgtgtctgctggtatacagaccagttttaggactggtaatccaacagggacttaccagaatggttatgatagcactcagcaatacggaagtaatgttccaaatatgcacaatggtatgaaccaacaggcatatgcatatcctgctactgcagctgcacctatgattggttatccaatgccaacaggatattcccaataagactttagaagtatatgtaaatgtctgtttttcataattgctctttatattgtgtgttatctgacaagatagttatttaagaaacatgggaattgcagaaatgactgcagtgcagcagtaattatggtgcactttttcgctatttaagttggatatttctctacattcctgaaacaatttttaggttttttttgtactagaaaatgcaggcagtgttttcacaaaagtaaatgtacagtgatttgaaatacaataatgaaggcaatgcatggccttccaataaaaaatatttgaagactgaaaaaaaaaa

SEQ ID NO: 95 - DNA, 2145 bp, Homo sapiens
ggcggttcaggcgccagagctggccgatcggcgttggccgccgacatgacgcccgaggacccagaggaaacccagccgcttctggggcctcctggcggcagcgcgccccgcggccgccgcgtcttcctcgccgccttcgccgctgccctgggcccactcagcttcggcttcgcgctcggctacagctccccggccatccctagcctgcagcgcgccgcgcccccggccccgcgcctggacgacgccgccgcctcctggttcggggctgtcgtgaccctgggtgccgcggcggggggagtgctgggcggctggctggtggaccgcgccgggcgcaagctgagcctcttgctgtgctccgtgcccttcgtggccggctttgccgtcatcaccgcggcccaggacgtgtggatgctgctggggggccgcctcctcaccggcctggcctgcggtgttgcctccctagtggccccggtctacatctccgaaatcgcctacccagcagtccgggggttgctcggctcctgtgtgcagctaatggtcgtcgtcggcatcctcctggcctacctggcaggctgggtgctggagtggcgctggctggctgtgctgggctgcgtgcccccctccctcatgctgcttctcatgtgcttcatgcccgagaccccgcgcttcctgctgactcagcacaggcgccaggaggccatggccgccctgcggttcctgtggggctccgagcagggctgggaagacccccccatcggggctgagcagagctttcacctggccctgctgcggcagcccggcatctacaagcccttcatcatcggcgtctccctgatggccttccagcagctgtcgggggtcaacgccgtcatgttctatgcagagaccatctttgaagaggccaagttcaaggacagcagcctggcctcggtcgtcgtgggtgtcatccaggtgctgttcacagctgtggcggctctcatcatggacagagcagggcggaggctgctcctggtcttgtcaggtgtggtcatggtgttcagcacgagtgccttcggcgcctacttcaagctgacccagggtggccctggcaactcctcgcacgtggccatctcggcgcctgtctctgcacagcctgttgatgccagcgtggggctggcctggctggccgtgggcagcatgtgcctcttcatcgccggctttgcggtgggctgggggcccatcccctggctcctcatgtcagagatcttccctctgcatgtcaagggcgtggcgacaggcatctgcgtcctcaccaactggctcatggcctttctcgtgaccaaggagttcagcagcctcatggaggtcctcaggccctatggagccttctggcttgcctccgctttctgcatcttcagtgtccttttcactttgttctgtgtccctgaaactaaaggaaagactctggaacaaatcacagcccattttgaggggcgatgacagccactcactaggggatggagcaagcctgtgactccaagctgggcccaagcccagagcccctgcctgccccaggggagccagaatccagccccttggagccttggtctgcagggtccctccttcctgtcatgctccctccagcccatgacccggggctaggaggctcactgcctcctgttccagctcctgctgctgctctgaggactcaggaacaccttcgagctttgcagacctgcggtcagccctccatgcgcaagactaaagcagcggaagaggaggtgggcctctaggatctttgtcttctggctggaggtgcttttggaggttgggtgctgggcattcagtcgctcctctcacgcggctgccttatcgggaaggaaatttgtttgccaaataaagactgacacagaaaatcaggtcagtgtctctgggctttgtgcaagctcagtttgaaaagggtttattcccatcactgcccaggacaccctgtggctttacttgctcatggtcagccaagcttacccttcacactgagaagtcatttctggctacttccttgggctcagttccctgggtcatcagccatcaaatcttgttgagtttaaaaaataaacagcaaaaaaaaacaaaccaaaaaaaaaaaaaaaaaaaaaaaaaaaaaaa

SEQ ID NO: 96 - DNA, 3285 bp, Homo sapiens
attcttccggtttcagaagttaaggctggtgtcctggccccagtccacctctgggagcgcctgcgccgctccgcggagagtccgtggatctcacagtgaaaaatgtttgctgacccttgacattgacaaactgctgacagctcagatgatccatgattggaaggatgtggtcatcaccaagatgtctttctttctccggttcccagttttccagacctgaagtgttttccaatcaaagcgaagagacgatctgtggatgttgaatatgcaaggagctgaagagagagacattagaagagagacttgtccaggctgggtaaacaagaacaagcctgctctggagcaggatgtctgtaaaattgactcatcagggatagtagtaaagaggttccaagaggatgaataccaagattctacatttgaagaaaaatatgcatgtgagggcatgaaggaaaactctcctagggagattgctgaatcatgccttttccaggaaggaggttttgggagaataactttcatccacaaagaagcaccccctgaaattattagtcaaggatataattttgagaaaagcttgcttttgacctcaagccttgttacacgtctcagggtttctacagaagagagtctgcatcagtgggaaacaagtaatatacaaaccaatgatatttcagaccaaagtaaatgtccaactctctgcacacagaaaaaatcttggaaatgtaatgaatgtggaaaaacctttactcagagctcatcccttacccaacatcagagaactcatactggagagagaccctacacatgtgaggaatgtgggaaagcctttagtcgtagttcattccttgttcaacatcaaagaattcacactggagtgaaaccatatggatgtgagcagtgtgggaaaacatttcgatgtcgatcatttcttactcagcatcaaagaattcacactggagagaaaccttataaatgcaatgaatgtgggaattccttccgcaatcactcacatctcactgaacaccagagaattcacactggagagaaaccttataaatgcaataggtgtgggaaggcattcaatcagaatacacaccttattcatcatcagagaattcacactggtgagaagccttacatatgcagtgaatgtggctcttcttttcgaaaacactcaaatcttacgcaacatcagagaattcacactggggaaaaaccccataaatgtgacgaatgtgggaaaactttccaaacaaaggcaaacctctctcagcatcagagaattcatagtggagagaaaccctataaatgtaaagaatgtggcaaagccttttgtcagagcccatctcttattaaacaccagcgaattcatactggagaaaaaccatataagtgtaaagaatgtggcaaagcgtttactcagagcaccccactcactaaacatcagagaatacatacaggggagagaccctacaaatgcagtgaatgtggtaaagccttcattcagagcatttgccttattcggcaccagagaagtcacactggagaaaaaccctataaatgcaatgaatgtggaaagggctttaatcagaacacctgcctcactcagcatatgagaattcatactggagagaagccctataaatgtaaagaatgtgggaaagcctttgctcatagctcatctcttactgaacatcatagaactcacactggtgagaagctctataaatgtagtgagtgtgagaaaaccttccgcaagtatgcacaccttagtgaacattacagaattcacactggtgagaagccttatgagtgtattgagtgtggaaagttcttcagacatagttcagtccttttcagacatcagaaacttcacagtggtgactaatgctgccatttaggttatgacagtttctctagcgaggatgactacgaatctgactgggagtagaggggcaggtagagttcctggagggaaggatgaaggagccttggctactgtactctgagaggaatgtttccagaaatggaggtgggagcttagggaatgcagagcctacttgaggtgggcatctgggaatacagggtagaaagaaattcctgcttttcagataaagcctacacattgccactgtctccccatgtgactcttacagcttgaggaggcatttgttagcacttctgttcactttactacatcctgccccacattctgacttgtcacccattttcgttggctggcaggttgagatgtttttcttaaacactgcctgtcagtgtgaagtggcacagctctgatgtagtgctaagtctagcctccagatttgaggcagccctgaccatgctaccatgggggaggctcccaacctgtggaagtggtcctgtgaaaaggagacagaaacaagtaagagccaaaaaaaaaaaaaaaaaaaatccatatccattcattaaaaaaatgagatataaagcaacaactgggctgacctctatagatctgccagtaaagaaggctttctttcattatcagggtgaaggtctttcctgattcttccaagctttgaggtgactcagagctaagaatgaaataggagaccaagttagaattcatgatactggtttatggggaggcagtcatacctgttcagagaaccaggaagactcaatatctatctcagaggaaatatggttacccaggaaagaaatggtctgctagagtgataagactcagaacaggaagcctgcatgtgactgagcaagtcacctacataaccctgcctgtactaaggtgtacacctgtctattgtaagtttgcctaggctgttggtgtacagagaccagaggagagagacacactaggactaacaatgtcctaacaaaatggtacttagtttgttggtctttaggagaaagcattagtaatgaaagaagaaagaattttcacttggttggacattggggctgcttaagaaagttgacatttgtcgtggaatgactttggaaagacttctaaaagaatctttttcaaatccctgaaaatcaggatagcacattttgctactgactgtgacagtgttttattcttttgagagaaatgacatagttttccctttatttcccaaattcctttcatgttcttaactgctacccagaaattgagcttcagaagattgaggatagcctttgattggtatttaaaataatttctaagctgtgaagcttatagcatttttaaagtatggctattaaaaacactaagttgattctggaaaaaaaaaaaaaaaa

SEQ ID NO: 97 - DNA, 3071 bp, Homo sapiens
ccgccattttgtgagaagcaaggtggcctccacgtttcctgagcgtcttcttcgcttttgcctcgaccgccccttgaccacagacatgtctcgggatcggttccggagtcgtggcggtggcggtggtggcttccacaggcgtggaggaggcggcggccgcggcggcctccacgacttccgttctccgccgcccggcatgggcctcaatcagaatcgcggccccatgggtcctggcccgggccagagcggccctaagcctccgatcccgccaccgcctccacaccaacagcagcaacagccaccaccgcagcagccaccgccgcagcagccgccaccgcatcagccgccgccgcatccacagccgcatcagcagcagcagccgccgccaccgccgcaggactcttccaagcccgtcgttgctcagggacccggccccgctcccggagtaggcagcgcaccaccagcctccagctcggccccgcccgccactccaccaacctcgggggccccgccagggtccgggccaggcccgactccgaccccgccgcctgcagtcacctcggcccctcccggggcgccgccacccaccccgccaagcagcggggtccctaccacacctcctcaggccggaggcccgccgcctccgcccgcggcagtcccgggcccgggtccagggcctaagcagggcccaggtccgggtggtcccaaaggcggcaaaatgcctggcgggccgaagccaggtggcggcccgggcctaagtacgcctggcggccaccccaagccgccgcatcgaggcggcggggagccccgcgggggccgccagcaccacccgccctaccaccagcagcatcaccaggggcccccgcccggcgggcccggcggccgcagcgaggagaagatctcggactcggaggggtttaaagccaatttgtctctcttgaggaggcctggagagaaaacttacacacagcgatgtcggttgtttgttgggaatctacctgctgatatcacggaggatgaattcaaaagactatttgctaaatatggagaaccaggagaagtttttatcaacaaaggcaaaggattcggatttattaagcttgaatctagagctttggctgaaattgccaaagccgaactggatgatacacccatgagaggtagacagcttcgagttcgctttgccacacatgctgctgccctttctgttcgtaatctttcaccttatgtttccaatgaactgttggaagaagcctttagccaatttggtcctattgaaagggctgttgtaatagtggatgatcgtggaagatctacagggaaaggcattgttgaatttgcttctaagccagcagcaagaaaggcatttgaacgatgcagtgaaggtgttttcttactgacgacaactcctcgtccagtcattgtggaaccacttgaacaactagatgatgaagatggtcttcctgaaaaacttgcccagaagaatccaatgtatcaaaaggagagagaaacccctcctcgttttgcccagcatggcacgtttgagtacgaatattctcagcgatggaagtctttggatgaaatggaaaaacagcaaagggaacaagttgaaaaaaacatgaaagatgcaaaagacaaattggaaagtgaaatggaagatgcctatcatgaacatcaggcaaatcttttgcgccaagatctgatgagacgacaggaagaattaagacgcatggaagaacttcacaatcaagaaatgcagaaacgtaaagaaatgcaattgaggcaagaggaggaacgacgtagaagagaggaagagatgatgattcgtcaacgtgagatggaagaacaaatgaggcgccaaagagaggaaagttacagccgaatgggctacatggatccacgggaaagagacatgcgaatgggtggcggaggagcaatgaacatgggagatccctatggttcaggaggccagaaatttccacctctaggaggtggtggtggcataggttatgaagctaatcctggcgttccaccagcaaccatgagtggttccatgatgggaagtgacatgcgtactgagcgctttgggcagggaggtgcggggcctgtgggtggacagggtcctagaggaatggggcctggaactccagcaggatatggtagagggagagaagagtacgaaggcccaaacaaaaaaccccgattttagatgtgatatttaggctttcattccagtttgttttgtttttttgtttagataccaatcttttaaattcttgcattttagtaagaaagctatctttttatggatgttagcagtttattgacctaatatttgtaaatggtctgtttgggcaggtaaaattatgtaatgcagtgtttggaacaggagaatttttttttcctttttatttctttattttttcttttttactgtataatgtccctcaagtttatggcagtgtaccttgtgccactgaatttccaaagtgtaccaatttttttttttttactgtgcttcaaataaatagaaaaatagttataatattggatcttcaactttgccattcatgcttctatgcatattaggctacgtattccacattgaaagcatgagagtgtctaggcctttgaatggcatatgccatttctgggaaatgcatctggaggctaagtattgctttctacaaataattgccccctttgttttaaaaagaagaaatgcatattgaagtagtttgatgatttgtttggcatataggaagcacgctggtgctaagtattttttaaatggttatgtaagcaaagctgaactgtaaatcttcaggaatatgtattaagattgtggaatgggtgtaagacaattggtagggggtgaaagtgggtttgattaaatggatcttttatggccctatgatctatcctttacttgaaagcttttgaaaagtggaaaggtcattttgttgcatttccccatttcttgtttttaaaagaccaacaaatctcaagccctataaatggcttgtattgaacttttacatttgaattaaagatgttaaacatgaaaaaaa

SEQ ID NO: 98 - DNA, 1342 bp, Homo sapiens
gaggaagtgacgacaggcgtgcccttgacaggcagggagggctaggctgtgcatccctccgctcgcattgcagggagatggctcagcgacttcttctgaggaggttcctggcctctgtcatctccaggaagccctctcagggtcagtggccacccctcacttccagagccctgcagaccccacaatgcagtcctggtggcctgactgtaacacccaacccagcccggacaatatacaccacgaggatctccttgacaacctttaatatccaggatggacctgactttcaagaccgagtggtcaacagtgagacaccagtggttgtggatttccacgcacagtggtgtggaccctgcaagatcctggggccgaggttagagaagatggtggccaagcagcacgggaaggtggtgatggccaaggtggatattgatgaccacacagacctcgccattgagtatgaggtgtcagcggtgcccactgtgctggccatgaagaatggggacgtggtggacaagtttgtgggcatcaaggatgaggatcagttggaggccttcctgaagaagctgattggctgacaagcagggatgagtcctggttcccttgcccgcgtgggaccccaatagaactcagcccttccatgccagcccttcctgctgcctccctcctgtctggctcctggggcccatgcttagagcccaggctccagccctgagtgcttccgagctggcggactgcccaggggccatcagaggatggtggtgctgctgctgatccggggaccgctgtcttccctcccatacgcctttcatccctccttctagggcctatggcagttctcccaggatgtgtggcgagagcctgggccagcccacagcgttcctagtcaggcagccacaccttggtcctcatcttggtcccttccaatctgaaacctcgtgcctggctcgtctgccacctacatttctctttccagctgctgttttgtaaaaagaaaaagaaaaaagaagcccaaactagtgagagtaatatctaattatctcattttttgtaggtctgtgataaagaacttagtcatcccttccacctcctactgtgaagaacagaccctgggtcccacactgaaatcccctctagtcacccattcccaccccccagggagctgcctcccaggcagggggtgcagaaaatgattgatgggctggggaaccctggagagcctcgactccggaagtctcaaggtgcctcctcctctccttagctggcccgttggttttctgagcagggggctgaactgtgaacaagtcagacaaataaagcaagggtctgcaccatcaaaaaa

SEQ ID NO: 99 - DNA, 2540 bp, Homo sapiens
acgagacgaagacggaaccggagccggttgcgggcagtggacgcggttctgccgagagccgaagatggcagtgaacgtatactcaacgtcagtgaccagtgataacctaagtcgacatgacatgctggcctggatcaatgagtctctgcagttgaatctgacaaagatcgaacagttgtgctcaggggctgcgtattgtcagtttatggacatgctgttccctggctccattgccttgaagaaagtgaaattccaagctaagctagaacacgagtacatccagaacttcaaaatactacaagcaggttttaagagaatgggtgttgacaaaataattcctgtggacaaattagtaaaaggaaagtttcaggacaattttgaattcgttcagtggttcaagaagtttttcgatgcaaactatgatggaaaagactatgaccctgtggctgccagacaaggtcaagaaactgcagtggctccttcccttgttgctccagctctgaataaaccgaagaaacctctcacttctagcagtgcagctccccagaggcccatctcaacacagagaaccgctgcggctcctaaggctggccctggtgtggtgcgaaagaaccctggtgtgggcaacggagacgacgaggcagctgagttgatgcagcaggtcaacgtattgaaacttactgttgaagacttggagaaagagagggatttctacttcggaaagctacggaacattgaattgatttgccaggagaacgagggggaaaacgaccctgtattgcagaggattgtagacattctgtatgccacagatgaaggctttgtgatacctgatgaagggggcccacaggaggagcaagaagagtattaacagcctggaccagcagagcaacatcggaattcttcactccaaatcatgtgcttaactgtaaaatactcccttttgttatccttagaggactcactggtttcttttcataagcaaaaagtacctcttcttaaagtgcactttgcagacgtttcactccttttccaataagtttgagttaggagcttttaccttgtagcagagcagtattaacatctagttggttcacctggaaaacagagaggctgaccgtggggctcaccatgcggatgcgggtcacactgaatgctggagagatgtatgtaatatgctgaggtggcgacctcagtggagaaatgtaaagactgaattgaattttaagctaatgtgaaatcagagaatgttgtaataagtaaatgccttaagagtatttaaaatatgcttccacatttcaaaatataaaatgtaacatgacaagagattttgcgtttgacattgtgtctgggaaggaagggccagaccttggaacctttggaacctgctgtcaacaggtcttacagggctgcttgaaccctcataggcctaggctttggtctaaaaggaacatttaaaaagttgccctgtaaagttatttggtgtcattgaccaattgcatcccagctaaaaagcaagaggcatcgttgcctggataatagaggatgtgtttcagccctgagatgttacagttgaagagcttggtttcattgagcatttctctatttttccagttatcccgaaatttctatgtattattttttggggaagtgaggtgtgcccagttttttaatctaacaactacttttggggacttgcccacatctctgggatttgaatggggattgtatcccattttactgtcttttaggtttacatttaccacgtttctcttctctgctccccttgcccactgggactcctctttggctccttgaagtttgctgcttagagttggaagtgcagcaggcaggtgatcatgctgcaagttctttctggacctctggcaaagggagtggtcagtgaaggccatcgttaccttgggatctgccaggctggggtgttttcggtatctgctgttcacagctctccactgtaatccgaatactttgccagtgcactaatctctttggagataaaattcattagtgtgttactaaatgttaattttcttttgcggaaaatacagtaccgtgtctgaattaattattaatatttaaaatacttcattccttaactctccctcatttgctttgcccacagcctattcagttcctttgtttggcaggattctgcaaaatgtgtctcacccactactgagattgttcagcccctgatgtatttgtattgatttgtttctggtggtagcttgtcctgaaatgtgtgtagaaagcaagtattttatgataaaaatgttgtgtagtgcatgctctgtgtggaattcagaggaaaacccagattcagtgattaacaatgccaaaaaatgcaagtaactagccattgttcaaatgacagtggtgctatttctcttttgtggccttttagacttttgttgccctaaaattccattttattgggaacccattttccacctggtctttcttgacagggtttttttctactttaaacagtttctaaataaaattctgtatttcaaaaa

SEQ ID NO: 100 - DNA, 1203 bp, Homo sapiens
agaaagccgcgcacctcctcccgccaggcgctttctcggacgccttgcccagcgggccgcccgaccccctgcaccatggaccccgctcgccccctggggctgtcgattctgctgcttttcctgacggaggctgcactgggcgatgctgctcaggagccaacaggaaataacgcggagatctgtctcctgcccctagactacggaccctgccgggccctacttctccgttactactacgacaggtacacgcagagctgccgccagttcctgtacgggggctgcgagggcaacgccaacaatttctacacctgggaggcttgcgacgatgcttgctggaggatagaaaaagttcccaaagtttgccggctgcaagtgagtgtggacgaccagtgtgaggggtccacagaaaagtatttctttaatctaagttccatgacatgtgaaaaattcttttccggtgggtgtcaccggaaccggattgagaacaggtttccagatgaagctacttgtatgggcttctgcgcaccaaagaaaattccatcattttgctacagtccaaaagatgagggactgtgctctgccaatgtgactcgctattattttaatccaagatacagaacctgtgatgctttcacctatactggctgtggagggaatgacaataactttgttagcagggaggattgcaaacgtgcatgtgcaaaagctttgaaaaagaaaaagaagatgccaaagcttcgctttgccagtagaatccggaaaattcggaagaagcaattttaaacattcttaatatgtcatcttgtttgtctttatggcttatttgcctttatggttgtatctgaagaataatatgacagcatgaggaaacaaatcattggtgatttattcaccagtttttattaatacaagtcactttttcaaaaatttggatttttttatatataactagctgctattcaaatgtgagtctaccatttttaatttatggttcaactgtttgtgagactgaattcttgcaatgcataagatataaaagcaaatatgactcactcatttcttggggtcgtattcctgatttcagaagaggatcataactgaaacaacataagacaatataatcatgtgcttttaacatatttgagaataaaaaggactagcaaataaaacacaaaaaaaaaaaaaaaaaaaaaaaaaaaaaaa

SEQ ID NO: 101 - DNA, 600 bp, Homo sapiens
gagggtccgcggttggtcagaccggggcacttggcctgaagacctggaattggcgacttcgatattaacaaggatggcggcggccgcagcaagtcgaggagtcggggcaaagctgggcctgcgtgagattcgcatccacttatgtcagcgctcgcccggcagccagggcgtcagggacttcattgagaaacgctacgtggagctgaagaaggcgaatcccgacctacccatcctaatccgcgaatgctccgatgtgcagcccaagctctgggcccgctacgcatttggccaagagacgaatgtccctttgaacaacttcagtgctgatcaggtaaccagagccctggagaacgttctaagtggtaaagcctgaagcctccactgaggattaagagcaacagccccagagcctgggctctgctggacttagtataatgtgaaaaaaatgtgttctcctattcctcataaagcttgtgctgtaaaatactttctcagggtgttcttgtcctcatctaccctctaccccttactgtgcaaccactgaggcaaagtagcttaatataaaaataaaactttattctgtctcaaaaaaaaaaaaaa

SEQ ID NO: 102 - DNA, 4320 bp, Homo sapiens
acagatcaacagtacaaattctgaagtttgtaaacttgctgatggtggtggtaagccatggcagatgataaagttgctatcttaacggatgatgaagaggaacagaagagaaagtatgtgcttgcagatccctttaatggtatttccagggaaccagaaccaccttcgaatgaaacaccttcctccacagaaacatctgctattcctgaggaggaaatagactggatagagaaacattgtgttaagataaacaacgatcttctaatttccaaggtcttttattttttcttttactctgcctatggctctctctatccccttttgcctgtgtattacaaacagctgggaatgtctccaagccagagtggactactagtaggtattcgttacttcattgaattctgcagtgcccccttttggggtgtagttgcagaccgctttaaaaaaggcaaaattgtcctcctcttttctcttttgtgttgggttttattcaacctgggcattggatttgtcaaacctgctaccttgagatgtgtaccaaagattcgcccaacaactcaccccaccaatgcaagtcaccagttaactatcctgccaacaaattcttcctttacctctttcctcaccatatcaccaaaaatgcgtgagaaaagaaaccttttggaaacagggctcaatgtctcagacaccgttactttgccaacagctccaaacatgaacagtgaacccactctgcagccccagacaggtgaaattactaaccgtatgatggacttgactttgaactcaagcacagcaacccctgtctccccaggaagcgtaaccaaggagacaaccactgttattgttaccaccaccaaatctttaccttctgaccaagtcatgcttgtttatgatcaacaagaagttgaagctatattcttggtgatcttggtagttgtcataataggagaatttttcagtgcctcttctgtcacaatcgtagacacggtcacactccagtatctgggaaaacacagagatcgctatgggttgcagcgcatgtggggctccctgggctggggcctggcgatgctgtctgtgggcatcgggatcgactacacccacatcgaagtgctcatcgatggaaaggggtgtaagccccccgagtacaggaattaccagatcgtcttcatcgtcttcggcgttctcatgaccatggccttgatcgttgccactcagttccggttccgctacaaccatttcaaaaacgatgattctaaagggaaagaggtggagatcccgcaggtggaaaggaacaactctacagagtcctctgaggagacaccaaccaccacaagccactcgcaggccttcaacttttgggacttaatcaagctgctctgcagcgtgcagtatggctcagtgctgtttgtggcttggttcatgggttttggatatggcttcgtgttcacctttctctactggcatttggaagacctcaatggaactacaaccctctttggggtctgttcagtcctgagtcatgtgtctgagctgacagcatatttttttagtcacaagcttattgaattgatcggccacatcagggttctgtacattggcctggcctgcaatacggctcgctatatttatatttcctacctggagaatgcctggactgttctccccatggaagttcttcaaggagtgacacacgcggccatctgggcagcatgcatttcttacctcagtgcagccgttccccctgagctgaggacatctgctcagggcatcctgcagggccttcacctgggtttgggaagaggatgtggtgccatgatcggaggcgtgttagtcaattattttggggctgctgcaaccttccgaggaattggcatggcctgcttggtgatcctactgctctttgccctgatccagtggctggcagtgccagatgaggaagaagacaagacaatgttggcagaaagaattcctgttccctccagtcccgttcctatagcaaccatcgacttggtacagcaacagacagaagatgtcatgccacgcattgagcccagacttccacccaagaaaactaagcaccaggaagaacaggaagatgtgaacaaaccagcctggggagtcagctcttctccctgggtgacctttgtctatgcactctaccaaattaaagagatgatgcaactcacaagagacaaccgtgcttctgagatacagcctttacaggggaccaatgagaatagggaaaattctcctgctggtagagcccagcctgtcccatgtgagactcactctgacccatctagaaaccagccatcccctgacgcagcagcatctcagacgcagaccagccccgctcaccccagtgtggacccgtgcacagaggagagtgaagagcagcaggctcagctggccgcgggaggacactgagggcatcctgctcatctcacaccctgcatggaatcaggctcctcagccaggacacagggtgaggccccccagccaggatatgcctcccctggaggagcacagcactgcatatgcttctaaatatctaaactcattaacatggaaacacacacacaggagctacagtacatattggcaggaaaaggtaaactttcgtaatctcattggaattacaacagggaaatggagttcaatgaggactttcagttctttgcttggttaggttaaggatgatagaatttctctgccagtgcagtaagagttgaaaccggcagttacactaagtaagtggagggaatgaaagtgtttcgaggtgaatgtggatataatttccctcttctgattatttattcttatttggttcctaacacaaactgggaagagatagaattcatctatactttcttttttcttggagagaaccgtttaaaaaattacaagatatatttaaaaagtaaccagataaaagtagcacatgtgcttttgttaaaaataaagttaaaagttaaagttaaaaaatgaagttaaaagtttcatcagaaactttacatatctttagcaaatatatttttatatgtgtatggcatataatggaaataattctttgagcaacagaagctattattaactactgcaagctaagccgagcttaaaaatgccttttgttttaaatgggctttgagaaaaaaaacagaaacaagcgattatttcaaatcaaccaaccaactcagtatcctgtgttttgatagacaagagtttactaaatatattgatactgtaaatagcctctctcgctatttactatcttatagtaattcaggctctaattagctgagggaatgaaacacacaaaaatcactgaattcctaagagttccttaaataagcagtactagttacaaatcacagtataagatttaagtgcctgggggaaggatacaatttttagaaattacatattgggtcagttttgttttgtttttggtgaggaaaaggtggtaaataggaaaccatgaatgggaaggatggcaataagtagcaactatactttccaatgactaaagaaagaaaatctcagtatattcgttctcatgaagacacagtcagacactggacaatgtaatgtatgcaactgcaaacgttacaactgcagccagaacaatggctgggtggatcgcacgtaaagcttgccactaaaaatcaaagcagaggttaacaggaaacctggggggagtgtggaaaagggaaaactgttttagctgaataaaggtgaattatataatttataatagctgtggatgagcacaggagagagaggaaagaaaagaacagtcgaaatgagcaactcaccttaccctctgaccctgattagacaggatcaattgtaaagtgagggcttctccatgacaccatagttctgcccaatactgcatttgggataagaaattctacacttggatgtctcgcttcacaataaaacacagcttaaaaataaaataactgaaagaaatagaattcagcaaatagttattttttgcacttgaactgaaacgtactgtactgtaaattatgactcattttaagtgacctttaaaatcagatgtatttattatgcttgtgtaattatagaaataaagaaatgggtgacaggcttaacctcacctatgaatgtacagtatgtggatttgtgaaactgactgtaggaagtcaaaaacttgtactgtatcttgtgtttacagttctgatttattcctttgaaaagcctgctgttttggaaatgcacagttgacatgttgaaataaaaatgaataccatttttaaaaaaaaaaaaaaaaaaaaaaaaaaaaaa

SEQ ID NO: 103 - DNA, 2625 bp, Homo sapiens
atagggtccacagccttgtgttcttcaaatactgtaaagcagccctctccagattccttgagggtcactttatattacacattcgtccacacaggacaacaaagtcaccacttccacccgccaaagcgcgctcaggtcggccgccacttcccttggtacacgcggaacgcaagccgcgccgaggctaaaggaagaggccggaatgcagggcgaaggggcgcagagatgctagccaatgctgccacctctattttggatataagggatcttgtaaagctccgttattcgtgtggctatcacaaacaaggtggtttcgaccggccttggctagagaaggcctcctcagcctctgaggatcccaaggtctgtcgcagcacccaacactcccctcgcaggcccagatgccgagggcggaggcgcggcctggagggactagttggcgcgcggctgcccggcgtggtgacgtcagggcggaagcgcacgcggcgtgaagcggcccagaacccggcggtcacgggaatatccgtcgcgccgagaacgctggttagtcttgtttcgggttccggctgcgttgggcttgcgtgcggctcgctaagactatggcgtccgggcctcattcgacagctactgctgccgcagccgcctcatcggccgccccaagcgcgggcggctccagctccgggacgacgaccacgacgacgaccacgacgggagggatcctgatcggcgatcgcctgtactcggaagtttcacttaccatcgaccactctctgattccggaggagaggctctcgcccaccccatccatgcaggatgggctcgacctgcccagtgagacggacttacgcatcctgggctgcgagctcatccaggccgccggcattctcctccggctgccgcaggtggcgatggcaacggggcaggtgttgtttcatcgttttttctactccaaatctttcgtcaaacacagtttcgagattgttgctatggcttgtattaatcttgcatcaaaaatcgaagaagcacctagaagaataagagatgtgattaatgtattccaccacctccgccagttaagaggaaaaaggactccaagccccctgatccttgatcagaactacattaacaccaaaaatcaagttatcaaagcagagaggagggtgctaaaggagttgggattttgtgttcatgtcaagcatcctcataagatcattgttatgtatttacaagtcttagaatgtgaacgtaatcaaaccctggttcaaactgcctggaattacatgaatgacagtcttcgaaccaatgtgtttgttcgatttcaaccagagactatagcatgtgcttgcatctaccttgcagctagagcacttcagattccgttgccaactcgtccccattggtttcttctttttggtactacagaagaggaaatccaggaaatctgcatagaaacacttaggctttataccagaaaaaagccaaactatgaattactggaaaaagaagtagaaaaaagaaaagtagccttacaagaagccaaattaaaagcaaagggattgaatccggatggaactccagccctttcaaccctgggtggattttctccagcctccaagccatcatcaccaagagaagtaaaagctgaagagaaatcaccaatctccattaatgtgaagacagtcaaaaaagaacctgaggatagacaacaggcttccaaaagcccttacaatggtgtaagaaaagacagcaagagaagtagaaatagcagaagtgcaagtcgatcgaggtcaagaacacgatcacgttctagatcacatactccaagaagacactataataataggcggagtcgatctggaacatacagctcgagatcaagaagcaggtcccgcagtcacagtgaaagccctcgaagacatcataatcatggttctcctcaccttaaggccaagcataccagagatgatttaaaaagttcaaacagacatggtcataaaaggaaaaaatctcgttctcgatctcagagcaagtctcgggatcactcagatgcagccaagaaacacaggcatgaaaggggacatcatagggacaggcgtgaacgatctcgctcctttgagaggtcccataaaagcaagcaccatggtggcagtcgctcaggacatggcaggcacaggcgctgactttctcttcctttgagcctgcatcagttcttggttttgcctatctacagtgtgatgtatggactcaatcaaaaacattaaacgcaaactgattaggatttgatttcttgaaaccctctaggtctctagaacactgaggacagtttcttttgaaaagaactatgttaatttttttgcacattaaaatgccctagcagtatctaattaaaaaccatggtcaggttcaattgtactttattatagttgtgtattgtttattgctataagaactggagcgtgaattctgtaaaaatgtatcttatttttatacagataaaattgcagacactgttctatttaagtggttatttgtttaaatgatggtgaatactttcttaacactggtttgtctgcatgtgtaaagatttttacaaggaaataaaatacaaatcttgttttttctaaa

SEQ ID NO: 104 - DNA, 3205 bp, Homo sapiens
ggcaggccaatatggcttcctgcacctggtgacgcttggcgaaactgaggtctcatggagaagccccggagtattgaggagaccccatcttcagaaccaatggaggaagaggaagatgacgacttggagctgtttggtggctatgatagtttccggagttataacagcagtgtgggcagtgagagcagctcctatctggaggagtcaagtgaagcagaaaatgaggatcgggaagcaggggaactgccgacctccccgctgcatttgctcagccctgggactcctcgctccttggatggcagtggttctgagccagctgtctgtgagatgtgtggtatcgtgggtacaagggaagccttcttctccaagaccaagaggttctgcagcgtctcctgctccaggagctactcctccaactccaagaaagccagtatcttggctaggttacagggaaaaccaccgaccaaaaaagccaaagtcctgcacaaggctgcctggtctgccaaaattggagccttcctccactctcaagggacaggacagctggcagatgggacaccaacaggacaagacgctctggtcttgggcttcgactgggggaagttcctgaaggatcacagttacaaggctgctcccgtcagctgtttcaagcacgtcccactctatgaccagtgggaggatgtgatgaaagggatgaaggtggaggtgctcaacagtgatgctgtgctccccagccgggtgtactggatcgcctctgtcatccagacagcagggtatcgggtgctgcttcggtatgaaggctttgaaaatgacgccagccatgacttctggtgcaacctgggaacagtggatgtccaccccattggctggtgtgccatcaacagcaagatcctagtgcccccacggaccatccatgccaagttcaccgactggaagggctacctcatgaaacggctggtgggctccaggacgcttcccgtggatttccacatcaagatggtggagagcatgaagtacccctttaggcagggcatgcggctggaagtggtggacaagtcccaggtgtcacgcactcgcatggctgtggtggacacagtaatcgggggtcgcctacggctcctctacgaggatggtgacagtgacgacgacttctggtgccacatgtggagccccctgatccacccagtgggttggtcacgacgtgtgggccacggcatcaagatgtcagagaggcgaagtgacatggcccatcaccccaccttccggaagatctactgtgatgccgttccttacctcttcaagaaggtacgagcagtctacacagaaggcggttggtttgaggaagggatgaagctggaggccattgaccccctgaatctgggcaacatctgcgtggcaactgtctgtaaggttctcctggatggatacctgatgatctgtgtggacggggggccctccacagatggcttggactggttctgctaccatgcctcttcccacgccatcttcccggccaccttctgtcagaagaatgacattgagctcacaccgccaaaaggttatgaggcacagactttcaactgggagaactacttggagaagaccaagtcgaaagccgctccatcgagactctttaacatggattgcccaaaccatggcttcaaggtgggcatgaagctggaggccgtggacctgatggagccccggctcatctgtgtggccacggtgaaacgagtggtgcatcggctcctcagcatccactttgacggctgggacagcgagtacgaccagtgggtggactgcgagtccccagacatctaccccgtcggctggtgtgagctcaccggctaccagctccagcctcctgtggccgcagaaccggccacaccgctgaaggccaaagaggccacaaagaagaaaaagaaacagtttgggaagaaaaggaaaagaatcccgcccactaagacgcgacccctcagacaggggtccaagaagcccctgctggaggacgaccctcagggtgccaggaagatctcgtcggagcctgttcctggcgagatcattgctgtgcgtgtgaaggaagagcatctagacgtggcctcgcccgacaaggcttcaagtccagagctgcctgtctccgtcgagaacatcaagcaggaaacagacgactgagccttcctgcctccagcctggcttctagctggaagccagcccagcgtttctctaccaccaccaccatgcctccacctgactttggcttggagactgatcctctctgtgtaaattctgcccggtgctgtgaaggctggacggtggaggacctgctggggtctcctgggacccgcctgttgcttctgccctcccctgtggaaaggtctatatgacgggccgcctgaggccccagaactcgtctgtgaaccaccttttccagccagagttcccaaagctggaacgctagctgcctgctcttccttaagatggcctccccccgacccgccacggccctcagttgccagggatggggccaccactgtcacactgtggaatacaagacagtgaactctgtctgcctgaacgagccatgtaaattaagttctagagcagctctctgagcaggataaggtcccctgacagtgagttgtgtggtgggggcagcctctgcctcaaaaattcaccaagcagaatgcctctcagcctcatgtgttggtcctctgctcctcctagctccccagggatgttggggacccagcttgtctcggcagctaagaagcagtgaccaggatgtggattttggcgacctgtgtggtggccttgagctgctttctgtgtttgtgaggactgactcccatttcctaaaggaaatgcccccggggaggacattgggaggaagatggcctgagtgtgcactttggctctgctacctgctcctgaagccccgctaaaaataattcatccaagattcctttgtagttaaagggtccagttctgactggagcctctagagagctgggcttgtatgttcttttggccttttgttcctacctaaatgaagaaaccatgcctggaggggccgtgaacacagaaccctcaagacaaggatgacagagctggaggacacatctagctgccattgcaacctcactgggctccccagactctgtgtgtgagaaattaaaccccctgcttgcttgaaaaaaaaaaaaaa

SEQ ID NO: 105 - DNA, 3250 bp, Homo sapiens
ttcgggtcccacagtttccagccgccgctctcctcagtgcccggtggcccaggagggcctgggagcccgaagccgtccccgagtcgctcctaggtcactggcgcgatgcgggccgtcctctcggctgatgggttggaagcccagcgaggctagaggccagtcccaaagtttccaggcatcagggctgcagcccaggagcctcaaggcggcccggcgggcgactggacggccggacaggtcccgagcagcccggcccaccacggacccctctgcccacaggtcccgagcagccccgcccaacatggacccagacccccaggcgggcgtgcaggtgggcatgcgggtggtgcgcggcgtggactggaagtggggccagcaggacggcggcgagggcggcgtgggcacggtggtggagcttggccgccacggcagcccctcgacacccgaccgcacagtggtcgtgcagtgggaccagggcacgcgcaccaactaccgcgccggctaccagggcgcgcacgacctgctgctgtacgacaacgcccagatcggcgtccggcaccccaacatcatctgtgactgctgcaagaagcacgggctgcgggggatgcgctggaagtgccgtgtgtgcctggactacgacctctgcacgcagtgctacatgcacaacaagcatgagctcgcccacgccttcgaccgctacgagaccgctcactcgcgccctgtcacactgagtccccgccagggcctcccgaggatcccactaaggggcattttccagggagcgaaggtggtgcgaggccccgactgggagtggggctcacaggatggaggggaagggaaaccgggccgtgtggtggacatccgtggctgggatgtggagacaggccggagtgtggccagcgtgacgtgggctgatggtaccaccaatgtgtaccgtgtgggccacaagggcaaggtggacctcaagtgtgtgggcgaggcagcgggcggcttctactacaaggaccacctcccaaggctcggcaagccggcggagctgcagcgcagggtgagtgctgacagccagcccttccagcacggggacaaggtcaagtgtctgctggacactgatgtcctgcgggagatgcaggaaggccacggcggctggaaccccaggatggcggagtttatcggacagacgggcaccgtgcatcgtatcacggaccgcggggacgtgcgcgtgcagttcaaccacgagacgcgctggaccttccaccccggggcgctcaccaagcaccactccttctgggtgggcgacgtggtccgggtcatcggcgaccttgacacagtgaagcggctgcaggctgggcatggcgagtggacggacgacatggcccctgccctgggccgcgtcgggaaggtggtgaaagtgtttggagacgggaacctgcgtgtagcagtcgctggtcagcggtggaccttcagcccctcctgcctggtggcctaccggcccgaggaggatgccaacctggacgtggccgagcgcgcccgggagaacaaaagctcactgagcgtggccctggacaagcttcgggcccagaagagtgacccagagcacccgggaaggctggtggtggaggtggcgctgggtaacgcagcccgggctctggacctgctgcggaggcgcccagagcaggtggacaccaagaaccaaggcaggaccgctctgcaagtggctgcctacctgggccaggtggagttgatacggctgctgctacaagccagggcgggcgtggacctgccggacgacgagggcaacacggcactgcactacgcggccctggggaaccagcccgaggccaccagggtgctcctgagtgctgggtgccgggcggacgccatcaacagcacccagagcacagcactgcacgtggccgtgcagaggggcttcctggaggtggtgcgggccctgtgtgagcgcggctgtgacgtcaacctgcccgacgcccactcggacacgcccctgcactccgccatctcggcgggcactggagccagcggcattgtcgaggtcctcacggaggtgccaaacatcgatgttaccgccaccaacagccagggtttcaccctgctgcaccatgcctccctcaagggtcacgcgctagctgtgagaaagattctggctcgggcgcggcagctggtggacgccaagaaggaggacggcttcacggcgctgcatctggctgccctcaacaaccaccgcgaggtggcccagatcctcatccgggagggccgctgtgacgtgaacgtgcgcaaccggaagctgcagtccccgctgcatctcgccgtgcaacaggcccacgtggggctggtgccgctactggtggacgctgggtgcagtgtcaacgccgaggacgaggagggggacacagccctgcacgtggcgctgcagcgtcatcagctgctgcccctggtggctgatggggccgggggggacccagggcccttgcagctgctgtccaggctacaggcctcgggcctccccggcagcgcggagctgacggtgggcgcggcggtcgcctgcttcctggcgctggagggcgccgacgtgagctacaccaaccaccgcggtcggagcccgctggacctggccgccgagggtcgcgtgctcaaggcccttcagggctgcgcccagcgcttccgggagcggcaggcgggcgggggcgcggccccgggccccaggcaaacgctcgggacccccaacaccgtgacgaacctgcacgtgggcgccgcgccggggcccgaggccgctgagtgcctggtgtgctccgagctggcgctgctggtgctgttctcgccgtgccagcaccgcaccgtgtgtgaggagtgcgcgcgcaggatgaagaagtgcatcaggtgccaggtggtcgtcagcaagaaactgcgcccagacggctctgaggtggcgagcgccgcccccgcccccggcccgccgcgccagctggtggaggagctgcagagccgctaccggcagatggaggaacgcatcacctgccccatctgcatcgacagccacatccgcctcgtgttccagtgcggccacggcgcatgcgccccctgcggctccgcgctcagcgcctgccccatctgccgccagcccatccgcgaccgcatccagatcttcgtgtgagccgcgccgtccgccgcgcccgagctgccttcgcgtgcccccgccctgtgttttataaaaagaaagattctcggaaaaaaa

SEQ ID NO: 106 - DNA, 2810 bp, Homo sapiens
agaagggctggtccagcggcggcggaggctggcgctgtcctgagagggagggctctgtgcggaagagtcagggcgacccttgggcgctggagtacgcttgggactggggctgcgagtgagcaccagcgattggttcggaagcggacatttggttcagaacgagcatttaactctgccagggatccgctgggctctgacgactgcggtagatccatggcttcctggacgttcacccgtagagtcatcctagcttaactcttgttccctggtctcagttcacaagcctcacctgtatcttcctggctcggaagataattgaaaccaagtctgacttctcaatgaatcggacaaagggtgatgaggaggagtattggaacagctccaagttcaaggcttttacctttgacgatgaagacgatgagctttcacagttaaaggagtccaagcgggcggtgaacagcctccgagacttcgtggatgatgatgacgatgatgacctggagcgagtcagctggagtggggaacctgtgggaagtatctcatggtccatcagagagactgctggtaatagcggctcaacccacgaggggcgtgaacagctaaagagccgaaacagcttctcctcctatgcacaactacccaagcctacttctacctactccctgagcagcttttttagaggtagaactagacctggaagtttccagtccctttctgatgctctgtcagacacacctgccaaaagctatgctccagagctggggagacccaaaggggagtatagggattacagcaatgactggagccccagtgatacagtgcgacgtctccggaagggcaaggtttgctcactagagagattccgctccttacaggacaaactacaactcctagaagaggcagtaagcatgcatgatggaaacgtcattactgcagttctgattttcctgaagaggacactgagcaaagagatcctcttccgagagctggaggtgcgacaggttgccctgagacatcttattcacttccttaaggaaataggggatcaaaagttgcttttagacctcttcaggttcctagatagaacagaagagcttgcgctatctcattatcgagagcatttgaacattcaggaccctgacaaacgaaaagaatttcttaaaacctgtgttggtttgccattttcagcagaagattccgcacacatacaggaccattacacgctcctggaacgtcagatcattattgaggcaaatgatcgccatctagaatcagcaggacagactgagatcttccgaaagcacccccgcaaagcctccatcctcaacatgccactagtgacaacacttttctactcctgcttctatcactacacagaggctgaggggacattcagcagtcccgtcaacctgaagaagacatttaagatcccagataaacagtatgtgctgacagccctggctgctcgtgccaagcttcgagcctggaatgatgtagatgccctattcaccacaaagaactggctgggctataccaagaagagagcacccattggcttccatcgggttgtcgaaattttgcacaagaacaatgcccctgtgcagatattacaggagtatgtcaatctggtggaagatgtggacacgaagttgaacttagccactaagttcaagtgccatgatgtcgtcattgatacctaccgggacctgaaggatcgtcaacagttgctagcatacaggagtaaggtagataaaggatcagcagaggaggagaagattgatgctcttctcagcagctcgcaaattcgatggaagaattaagtggcattgactaccttgaagcctgcctcatttcctcctctcctgcctgtgaaagcagagagagctcttctttgggagagctgcggcatcacatcgcttgggcccattacccatgggcagtgccagctactcttgacacagataacttcagactgatcttctgtccaaggaacatcatctgaggatcgagatctaaagctttgagtcatgagaatgattctctccacctggtgctcatatgaaggtgggagtgatttctagattgggcccctactgggtaagatctcacttggtctgagaaaagtgactgctccagaaaggaagaggtatgggagtcatagggtggctactgcattccactcagctaattatgatccaggacttggcgctggacattggcagttctgctctgaatgaagtcagaacagaaccaaaatggcctcaggaaggaatgccagtgtttcccaagacctcctggagatgcactcacaccagactgcacagacccctccacattatgccacacacggcctagacgttgtgtttcctcagccattttccctctgctgccccagtttactctgtccaaaaccctaaggttcttctctcacttgaacacagacgaccttgcttgggtgatgagacatcccctttatctcttcctctactgctggccaagacccgtcactttataagaagctcagatgcagcagtgctggagagctctctctttatgcaaaaatctcatttcaccaggagctttcagaagtttcacctgggctaaattcagcagcatttctgttaggatatttagatggaggttttattttcacacttggattcttgctctgtaccaatatttgcctccttttctgtgactgaactgggtttttctgacatgcctagactcctaataaaggtatttcttccttggtgccttcaaaaaaaaaaaaaaaaaaaaaaaaaaaaaaaaaaaaaaaaaaaaaaaaa

SEQ ID NO: 107 - DNA, 3872 bp, Homo sapiens
cggacgaggcacgagtgaggggggaggcggtggcggcggccattttgagccgctgccgccattggagtgggccccccccctttcccccttcgcctcctgacaggaaaggtttaagggggacagagccctgggaggccgggccgggctcgggggccaccccgggggcccgggccatggatgtgcgccgtctgaaggtgaacgaacttcgcgaggagctgcagcgccgcggcctggacactcgaggcctcaaggccgagcttgctgagcggctgcaggcggcgttggaggccgaggagcctgacgacgagcgggagctcgacgccgacgacgaaccggggcgacccgggcacatcaacgaggaggtcgagaccgaggggggctccgagctggaggggaccgcgcagccaccgccgcccgggctgcagccgcacgcggagcccggcggctactcggggccggacggacattatgccatggacaatattaccaggcagaaccaattctacgatacccaagtcatcaaacaagaaaacgagtcaggctacgagaggagaccactggaaatggagcagcagcaggcctatcgtccagaaatgaagacagagatgaagcaaggagcacccaccagcttcctcccgcctgaagcttctcaactcaagccagacaggcagcaattccagagtcgaaagaggccttatgaagaaaaccggggacgggggtactttgagcaccgagaggataggaggggccgctctcctcagcctcctgctgaagaggatgaagatgactttgatgatacccttgttgctattgacacctataactgcgacctccacttcaaggtggcccgagatcggagtagtggctatccgctcacaattgagggctttgcatacctgtggtcaggagcccgtgccagctatggggtcagaaggggccgtgtatgcttcgagatgaagatcaatgaggaaatctccgtgaagcaccttccgtctacagagcctgacccccacgtggtccgtatcggctggtccctggactcctgcagcacccagctaggcgaagagcctttctcctatggctatggaggcactgggaagaagtccaccaatagccggtttgaaaactacggagacaagtttgcagagaacgatgtgattggctgctttgcggattttgaatgtggaaatgacgtggaactgtcttttaccaagaatggaaagtggatgggcattgctttccgaatccagaaggaagccttggggggtcaggccctctatcctcatgtcctggtgaagaattgcgcagtggagttcaacttcggacagagagcagagccctactgttctgtcctcccggggtttaccttcatccagcaccttccccttagtgagcgtatccggggcaccgttggaccaaagagcaaggcagaatgtgagattctgatgatggtgggcctgcctgctgctggcaagaccacatgggccatcaaacatgcagcctccaacccttccaagaagtacaacatcctgggtaccaatgccatcatggataagatgcgggtgatgggcctacgccggcagcggaactatgctggccgctgggatgtcctgatccagcaggccacccagtgcctcaaccgcctcatccagattgctgcccgcaagaaacgcaactatatcctagatcagacaaatgtttatgggtcagcccagagacgaaaaatgagaccatttgaaggcttccagcgcaaagctattgtaatttgtcccactgacgaggacctaaaagaccgaacaataaagcgaaccgacgaggaagggaaggatgtcccagatcatgcggtcttagaaatgaaagccaacttcacgttgccagatgttggggacttcctggatgaggttctgttcattgagctgcagcgggaggaagcggacaagctagtgaggcagtacaacgaggaaggccgcaaggctgggccaccccctgaaaagcgctttgacaaccgaggtggtggtggcttccggggccgcgggggtggtggtggcttccagcgctatgaaaaccgaggaccccctggaggcaaccgtggcggcttccagaaccgagggggaggcagcggtggaggaggcaactaccgaggaggtttcaaccgcagcggaggtggtggctatagccagaaccgctggggtaacaacaaccgggataacaacaactccaacaacagaggcagctacaaccgggctccccagcaacagccgccaccacagcagcctccgccaccacagccaccaccccagcagccaccgccaccacccagctacagccctgctcggaaccccccaggggccagcacctacaataagaacagcaacatccctggctcaagcgccaataccagcacccccaccgtcagcagctacagccctccacagccgagttacagccagccaccctacaaccagggaggttacagccagggctacacagccccaccgcctccacctccaccaccacctgcctacaactatgggagctacggcggttacaacccggccccctataccccaccgccaccccccactgcacagacctaccctcagcccagctataaccagtatcagcagtatgcccagcagtggaaccagtactatcagaaccagggccagtggccgccatactacgggaactacgactacgggagctactccgggaacacacagggtggcacaagtacacagtagccagtgtgacccagaggctcccggaggcccctgccggcttcctccaccagcgcctgcctcggcccctcctctgcccccgccagatcccgtggtgctggggatggggtcatcccagggctgcctccctccagcccactgcctcccctctgaggggcttccttcccctccatagggccaggcatttttttctggattcaaacaggcaacaatgaccttttattttctgtttgtccccacctccccagccttccacctcctgttcttcctaccttcttcctttttgactaaataatccccacctcccttgatcatacagtgaggctacagtgactgaggggagaatcccctcctgttcactctcccaaccctgctccagcccctcagcttcccagaccctcatgcagttggttgtaaattctcccaggagctgttttactgtctacttttcaggattaaaaaaaaaatcaaaacttaaaaaaaaaaaagtttaaaaagcaaaatggggagggggaggaagcagtgacttttttttggtaattatgcgcttttttttaatttttagaatttgtctttttactgtgggtgggctgttgatatttcatcaagataagcatttctttcctgagttcaggtgactgaggaagagccacaaaacaaaacacaacaaaaccaaaccacagaatcatctttaacccaactttttatacgatgccccagttccccataactttgcacacaagcttctgtgttcagttgaattgtaactgctttttgtatttggagagagtgactattgaacttgaaaccttttattccgggcgtcttggtagtttctggtgggattcagtgggtgagagggaagaaggggaggttggggggctccttcccttcagaacttgaagtttctcccactgcctcctctccagtggtctcccaggtgccagacccaaaagcttttcctacagtgataccctttatttttacttccccttgactcatatgttttaacatgattttaacaaactgcacttattaagaaatgtgtttgccctgttttgtttggtttcgttttgttttctttgaataaatgacatggcacctcctagcaggaaggaagcagggttgaaa

SEQ ID NO: 108 - DNA, 1384 bp, Homo sapiens
gtttgcgggtgcgggcgggaccggatttcgtccgtgggcccgggggcggcgggggccggggagtgaggggccggctgagcccacctcgctgggccctccctggcgccccgccttgggcggcggcgagcgcgcgggccgccatgtcgtacatgctcccgcacctgcacaacggctggcaggtggaccaggccatcctctcggaggaggaccgcgtggtcgtcatccgcttcggccacgactgggatcctacgtgcatgaagatggacgaggtcctgtacagcatcgccgagaaggttaaaaattttgcagttatttatcttgtggatattacagaagtgcctgacttcaacaaaatgtatgagttatacgatccatgtactgtcatgtttttcttcaggaacaagcacatcatgattgacttggggactggcaacaacaacaagattaactgggccatggaggacaagcaggagatggtggacatcatcgagacggtgtaccgcggggcccgcaaaggccgcggcctggtggtgtcccccaaggactactccaccaagtaccgctactgaggcgccctcagtctgcgcggataaatgtcgtggagccctttttgtatggaaacgttttaagctatttaaagcctttggaaaatacaggaagctccagggctggagcacctctgagatggaattgataacatggtcttaactcaccgaaataaacaagcacgtggtgagaggagcaggcctacttgtttgttctcaggaaacttaatgaatagattactgattttcctagtcaaagttaattcttacccttggagtaaaacgaaggtgtttatcctgtgagcctgtgcgttttgcatactgggttggtttgctggggctgcggtgacagcatatgccgcgagctgggctttaacagagatgtgtgctctcacagctttgcaggcgggggtctgagatcagggtgtcgcgggtagggggtcactgctgaggccgtgaggggaatctgctcaggcctgtccctggcttctgggggctgctggtggtattttcagttccttggtgtgtggatacttcgccccatctctgccttcacctgtgtcctccctgtgtgggtgctggtgtccaaaatttccccttttcgtagtgacaccagctgtgttggattggggcccaccctgctccagcatggcctaatcttaactaattacatttgcaaggatcttatgtccacaaaagtcacagtctgaggtgctgggggttaggacttcaatatataaattttgcggttacacaattcaatccatgacagaatccaaaggtttactctggttataaaaacagtacaataaaatattgtttatagccttccctgtaag

SEQ ID NO: 109 - DNA, 1679 bp, Homo sapiens
gccagaggcggagccgccgccctgccgcgactttcagactccgaccatggcctcgcgctggtggcggtggcggcgcggctgctcctggaagccggcggcgcggagccccgggcccggctcccccggccgtgcgggaccgttggggccgagcgccgctgccgaagtccgcgcgcaggttcataggcggaagggacttgacttgtctcagataccctatattaatcttgtgaagcatttaacatctgcctgtccaaatgtatgtcgtatatcacggtttcatcacacaaccccagacagtaaaacacacagtggtgaaaaatacaccgatcctttcaaactcggttggagagacttgaaaggtctgtatgaggacattagaaaggaactgcttatatcaacatcagaacttaaggaaatgtctgagtactactttgatgggaaagggaaagcctttcgaccaattattgtggcgctaatggcccgagcatgcaatattcatcataacaactcccgacatgtgcaagccagccagcgcgccatagccttaattgcagaaatgatccacactgctagtctggttcacgatgacgttattgacgatgcaagttctcgaagaggaaaacacacagttaataagatctggggtgaaaagaaggctgttcttgctggagatttaattctttctgcagcatctatagctctggcacgaattggaaatacaactgttatatctattttaacccaagttattgaagatttggtgcgtggtgaatttcttcagctcgggtcaaaagaaaatgagaatgaaagatttgcacactaccttgagaagacattcaagaagaccgccagcctgatagccaacagttgtaaagcagtctctgttctaggatgtcccgacccagtggtgcatgagatcgcctatcagtacggaaaaaatgtaggaatagcttttcagctaatagatgatgtattggacttcacctcgtgttctgaccagatgggcaaaccaacatcagctgatctgaagctcgggttagccactggtcctgtcctgtttgcctgtcagcagttcccagaaatgaatgctatgatcatgcgacggttcagtttgcctggagatgtagacagagctcgacagtatgtactacagagtgatggtgtgcaacaaacaacctacctcgcccagcagtactgccatgaagcaataagagagatcagtaaacttcgaccatccccagaaagagatgccctcattcagctttcagaaattgtactcacaagagataaatgacaactctttctgttctttctggcagctatcttaccagactgtgcctaaagaattttgtggaatacactttgtttgcttcatgtgcagataaccaaaaatcattttaaaagatatcaaacttattgatgggcaatttatttttttttattgcaaaagttttttcagaaaactttttaaatgtaattaataaaccacctgaatctgtcattctagtcctataaattataatcaaggtatcttgatggttatatgtggtattgtttacactgttaatatccacatgtaaggccattacacaaataaataaccaatgttaaaattcaaaaaaaaaaaaaaaaaaaaaaaaaaaaaaaaaaaaaaaaaaaaaaaaaaaaaaaaaaaaaaa

SEQ ID NO: 110 - DNA, 6085 bp, Homo sapiens
tctctctctctctcactcactcactctctctctccctctccctctcctctccttcctcctccgcctcctcagctcttgggctagaatatctatgggtcgaaacgtgatgcgatgaattcgagagagagcgaaactaggacgaggagtgcggcggaagcggcgggactcccgggcatgggggcttcaccacaatagaggcagcgcccccacccgcccccgccagcccctccggagcgaagcccccaaaccccctcgggaaaaggatggcggcagcacctacccagatcgaagccgagctgtattacctgatcgctaggttcttgcagtctggaccctgcaacaaatccgctcaggtgctagtgcaggagctcgaggagcatcagctgattccgcgccgcttagattgggaggggaaagagcaccgaagaagcttcgaggatctggtggcagcaaatgcacacattcctccagactacctccttaaaatttgtgagagaattggtcctttactagataaagagatccctcagagtgttcctggggtacagacattattaggtgttggtcggcagtctctgctacgggatgccaaagactgtaagagtacactatggaatgggtctgcttttgcggctctgcatagaggcagacctccagaactacctgtaaattatgtgaaacctccaaatgtggtgaatatcacctctgccaggcaattaaccggctgtagtcgctttggtcatattttcccttcatctgcttaccagcacattaagatgcataagagaattctggggcacttgtcatctgtctactgtgtagcatttgaccgaagcgggagaagaatttttacaggttccgatgactgtttagtaaaaatttgggctacagatgatggacgccttcttgctacacttcgtggacactctgctgaaatttctgacatggctgttaactatgaaaacactcttattgctgcaggcagctgtgataaggtagtaagagtatggtgtcttcgaacttgtgcacccgttgcagtccttcagggccattcagcttctattacttccatacagttttgtccatcaactaaaggcacaaacagatacctcacttctactggtgctgatggaacaatctgtttctggcaatggcatgtaaaaacaatgaagtttagagatcgcccggtgaaatttactgagagatccagacctggagtccagatatcttgttcatctttcagttctggtggtatgttcattacaactggtagtactgaccatgtgattagaatatattatttgggttctgaggttcctgagaaaattgctgaattagagtcacatacggataaagttgttgctgttcagttctgtaacaatggagacagtttaagatttgttagtggaagtcgagatggaacggcaagaatttggcagtatcagcaacaagaatggaagagtatagtgctagacatggctactaaaatgactggcaataatttgccatctggagaagacaagatcactaaacttaaggtgactatggtggcctgggatcgctatgataccacagttattactgcagtgaacaattttcttttgaaagtgtggaattctatcacaggacagcttcttcatacattatctggacatgatgatgaagtattcgttctagaagcccatccatttgatcaaaggatcatactttcagcaggtcatgatgggaacatttttatttgggaccttgaccgggggaccaaaattcggaattactttaacatgattgaaggccaaggccatggtgcggtgtttgattgtaaattttcaccagatggaaaccattttgcctgcacagattctcatggacatttgctgctttttggttttggatgcagtaaatactacgaaaagattccagatcagatgttcttccacacggattatcgtcctcttattcgtgatgccaataactatgtattggatgaacaaacccaacaagctcctcacctcatgcctcctccatttttggtggatgttgatggaaatcctcatcccacaaaattccaacggttggtaccaggacgggaaaattgtaaagatgaacagcttataccacagctgggatatgtggctaatggtgatggtgaggtagtagaacaggtaattgggcagcaaaccaatgaccaagatgagagcattcttgatggaataatcagggagctgcagagagaacaagacctgagactaattaatgaaggagatgttccacatttaccagttaatagagcatactctgttaatggtgctctgagaagtccaaacatggacatatcttcttccccaaacatcaggcttcgaagacatagtagtcaaattgaaggtgttagacaaatgcataacaatgctcctcggagccagatggccactgaaagagatctcatggcgtggagcagaagagtggtggtcaatgaactaaataatggggttagtagggtacaggaagaatgtcgaactgcaaaaggtgacatagaaatcagtctttatacagttgaaaagaagaaaaagccatcttacactactcaaaggaatgattatgagcctagctgtgggcgttctttacgcaggacacagcgcaaacgtcagcatacttaccaaacacggtccaacatagagcataattcacaggcatcatgtcaaaattcaggtgtacaggaagactcagacagttcttcagaggaagatgaaactgttggcacaagtgacgcttcggtagaggatcctgttgttgaatggcaaagtgaaagttcttccagtgactcatcaagtgaatattctgattggacagcagatgctggaataaatttacaacccccaaaaagacaaaccagacagacaacacgtaaaatatgcagcagctctgatgaggaaaatttgaagtccctagaagaaaggcagaagaaacctaagcagactagaaagaagaaaggaggactggtttctatagcaggtgagcctaatgaagaatggtttgcccctcagtggatcttggatactataccccgacgttccccatttgtcccacaaatgggagatgagcttatctattttaggcaaggacatgaagcttatgttcgggctgtaaggaaatcgaaaatatacagtgttaatttacaaaaacagccatggaacaaaatggatctcagggagcaagagtttgttaagattgtaggaatcaaatatgaggttggcccacccacactgtgctgcttgaagcttgcatttctggacccaatttcaggcaaaatgactggagaatctttttccattaagtatcatgacatgccggatgtcattgacttccttgtgctacatcagttttataatgaagccaaagaaaggaactggcagattggtgatagattccgcagtataatagatgacgcctggtggtttgggactgtggagagtcagcagccttttcaaccagagtatcctgatagttctttccagtgttacagtgttcactgggacaataatgagagagaaaagatgagcccatgggatatggagccaattccagaaggaactgcctttccagatgaagttggtgctggtgttcctgtctcccaggaagaattgactgctttgctatacaaaccccaggaaggagagtggggggctcattccagagacgaagaatgtgaacgggttattcagggcatcaaccaccttctttccctggattttgccagcccttttgctgttccagtggatctcagtgcctaccccttgtattgtactgtagttgcttatccaactgacctcaataccatcaggcggagacttgaaaatcgcttttacaggagaatatcagcattaatgtgggaggtacgctatattgaacataatgccaggactttcaatgagccagacagtcctatagttaaagcagctaaaattgtaactgatgtcttacttcgatttattggggatcagagctgtactgatatactggatacttataataaaattaaagcagaagaacgaaacagtactgatgcagaggaggatacagaaattgttgatttagattcagacggtcctggtacttcatctggaagaagggtcaaatgccgaggcagaagacagtctttaaagtgtaatcctgatgcttggaaaaaacaatgcaaggaactattgagcctcatttatgaacgtgaagactcggagccatttcgacagccagctgatcttctttcttacccaggtcatcaggagcaagagggagaatcctcagagtctgttgttccagaaagacaacaagattcatctctttctgaggattatcaagatgttatagatactcctgtggacttcagcactgtgaaagaaactttggaagcaggaaactatggtagtcctctggaattttataaggatgttcgccaaatattcaacaactccaaagcttatacctctaataaaaagtcaaggatctatagcatgatgctgcgattatctgccttatttgaaagtcatatcaaaaatatcatctctgaatataagtcagcaatccagagtcagaagaggagaaggccacggtacagaaaacgtctaagaagcagcagcagttcattatctagtagtggagcacctagtccaaaagggaagcagaaacaaatgaagttgcagcctaaaaatgaccagaatacctcagtatctcatgccaggactagctctcctttctcatctcctgtttcagatgctgctgaagggctttcactatatctacttgatgatgagccagatgggccattttcttcatcgagcttcggtggatatagccgaagtggaaatagccatgacccagggaaagccaaatcatttcggaatagagttttgccagttaaacaagatcactcccttgatggaccccttacaaatggtgatggcagagagccccggacaggaatcaagagaaaactacttagtgcatcagaagaagatgaaaacatgggaggagaagataaagagaaaaaagaaacaaaagagaaatctcatttatccacctcagagagtggagagttaggatccagtttaagttctgaaagtacctgtggttctgactctgactctgaatcaacttccagaacagatcaagattacgtagatggagaccatgattatagcaaattcatacaaaccagacctaaaagaaaactcagaaagcaacatggcaatggaaaaagaaattggaagaccagaggcacaggaggaagaggcagatggggaagatggggtagatggagtagaggaggcagaggaagaggaggcaggggacgagggagtcgaggaagaggtggaggtggcactagggggaggggaagagggagaggaggaagaggtgcttctagaggagctaccagagccaaacgagcacgtattgcagatgatgaatttgataccatgttttcaggacgtttcagtagactgcctcgaattaaaacaagaaaccaaggcaggaggactgttttatataatgatgattctgataatgacaattttgtgtccactgaggatcctctgaatcttggtacatccagatcaggcagagtgcgtaaaatgacagaaaaagccagggttagccatctcatgggatggaattattaacagttaataaatttagaataacttaaaaaattcaatggccttctactgcagggaatttaccaggaaatctacaaagcaagttgtgtggggacttctgcttcctttcacattggtgcttttccatttatgccagtatacatttgtttcaagacttttgatctccacacttcatttgttcaaataagccttactcattaggccttaaattaaaagaaattctgcccacacacacacaaacacatacacacacatacacacacacagacacacacacacgaaacacaacacagacactacagatttactacattaaaggagcattcagcttcttaagagtagcatgacatttttatctcaatagaatagccctcttttgcttttgtatcacagaagtatagcaccttcttacagag

SEQ ID NO: 111 - DNA, 1954 bp, Homo sapiens
gtctttcactctctcatactttctcctctcccctctcccaagcacatctgagttgctgcctgttcttcacacttagctccaaacccatgaaaaattgccaagtataaaagcttctcaagaatgagatggattctagggtgtcttcacctgagaagcaagataaagagaatttcgtgggtgtcaacaataaacggcttggtgtatgtggctggatcctgttttccctctctttcctgttggtgatcattaccttccccatctccatatggatgtgcttgaagatcattaaggagtatgaacgtgctgttgtattccgtctgggacgcatccaagctgacaaagccaaggggccaggtttgatcctggtcctgccatgcatagatgtgtttgtcaaagttgacctccgaacagttacttgcaacattcctccacaagagatcctcaccagagactccgtaactactcaggtagatggagttgtctattacagaatctatagtgctgtctcagcagtggctaatgtcaacgatgtccatcaagcaacatttctgctggctcaaaccactctgagaaatgtcttagggacacagaccttgtcccagatcttagctggacgagaagagatcgcccatagcatccagactttacttgatgatgccaccgaactgtgggggatccgggtggcccgagtggaaatcaaagatgttcggattcccgtgcagttgcagagatccatggcagccgaggctgaggccacccgggaagcgagagccaaggtccttgcagctgaaggagaaatgaatgcttccaaatccctgaagtcagcctccatggtgctggctgagtctcccatagctctccagctgcgctacctgcagaccttgagcacggtagccaccgagaagaattctacgattgtgtttcctctgcccatgaatatactagagggcattggtggcgtcagctatgataaccacaagaagcttccaaataaagcctgaggtcctcttgcggtagtcagctattgcatagagagtggtgtctattcctatggagaagccagtagttagaaacggtgagaattccaacactgttcatgtaacagtaactccatagatggaagagcattggcaggaaaaagctctagaggctatacagagaagaaaaaaagagcaaaaatgagacctgtatattacttttatttttaggaccataatcaactttgtaatattcttatataattaattagtggtggtctccgactttatagcaggaactttctggtagtatgagaagaaatcattgggtgactatgactaatgtttcagaattactttttaattgttttaaaaagcactccagataatttataagtaacataggcctcatatttacactatatgttcgctttataattccgaagttgttatttgctaaatctccaatggttgcaatcaaaccccacaatgctgaaaacagagattgattttgatgttaagaacaaaagaagtatggaaacttccaggcttaaacatgtcccccgtgccacaaggcaaactgcgatgagctcacagtccaggtctcttgctgtgtgtcctgcagggagtggccaactctccaccttccagcaccattatcagagggtgggaaaaggcacatgaaagtggccagctcctgtcaatttatttgcttacaagggagaatgcttggaaaggttgcattggttgaaaccactgaggagcatcaccctggggatttcatgttttcactctgttcttagtcccaggagccacaggtaatcgagaatgtttgtgaactctatccacatcccctcccccacctgccaaataacctgttcaaaacaaagaaggcatagaatataaatgaatttcaaaagttaaaaaaaaaaaaaaaaaaaaaaaaaaaaaaaaaaaaaaaaaaaaaaaaaaaaaaa

SEQ ID NO: 112 - DNA, 2045 bp, Homo sapiens
cgtggatgtgggcctgaatcggatggcctggaactcgccttcccggcgacctgtttggcagggcggggcgcctcgcgaagatggtggcgcgcgtggcgtgtggctcccgtcgtctggccaagtctcagcgcagcgcaccggccggcgtctcgttggcctggagcccacacccaccgggtccctgaccccgcgccccccgcgcccggttcccggcatgcctcgcgcccgtaagggcaacacgctccggaagggtggtcagcgccgtggaggaggtgcccggagcagtgcccaagctgactcgggttccagtgacgatgaggcagccagtgaggcccgcagcaccgccagtgaatgccccagccttctcagcaccactgcagaggacagccttgggggggatgtcgtggatgagcagggccagcaggaagaccttgaggaaaagctgaaggagtatgtggactgtctcacagacaagagtgccaagacccggcagggtgctcttgagagcctgcgcctggccctagcgtcccgcctactccccgacttcttgctggagcgccgcctcacgctagccgatgccctggaaaagtgcctcaagaaagggaagggcgaggaacaagccctggctgctgctgtgctaggcctgctctgcgtgcagctgggccctggacctaagggtgaggagctgtttcacagcctgcagcctctgctggtctctgtgctcagtgacagcacagctagccctgctgcccggctccactgtgcttctgcccttggcctgggctgctacgtggctgccgctgacatccaggacctggtctcttgccttgcctgcttagaaagtgttttcagccggttctatggcttggggggcagctccacaagtcctgtggttcctgccagcctgcacggcctgctctctgctgccctgcaggcctgggcattgctgctcaccatctgccctagcacccaaatcagccacatccttgacaggcagctgccccggctgccccagctcttgtccagtgaaagtgtgaacctgcggatcgctgccggtgaaaccattgcactgctctttgagcttgcccgggaccttgaggaggagtttgtttacgaggacatggaggccctctgcagtgtcctgcgcactctggccactgacagtaacaagtaccgtgccaaggctgatcgtcggcgccagcgctctactttccgcgccgtgctgcactccgtggagggcggtgaatgcgaagaagagatagtgcgcttcggctttgaggtgctctacatggacagctgggctcggcaccggatctacgctgccttcaaggaagtgctgggttcgggcatgcaccaccacctccagaacaatgagctactccgtgacatctttggcctgggccctgtgctgttgctggatgccactgccctgaaggcctgcaaggttccacgctttgagaagcacctgtacaatgctgctgccttcaaagcccggaccaaggctcgaagccgtgtgcgggacaagcgggcagacatcctgtgaagcaggacctgctgaagaggagactttctatgcccttggtccgtatttttaacagaagacagtgcaacaactggtctccaccagtatttgtcactttattttttttaatgacaaaaccaaaaacagacatggggtgggtagctgggggcccggacacttgggaccctgacccctttgtccctgcactcagccctgtggccccttcctgtcctgtctcaggccaggctaaatatgtgccttcctcagggctgtggggcaggcactagggggcctttcccttcctttcctttctcaggccttgctcccccaggatgacccactcttaggggggtggtggcatctggacaaatgccaccacagcaggtggggtggcaaagctacctggaatggatttgtgtgctgatttttaaggattattacagataattaaacagaacggtcagccttctgtggtcttaacccctgggtatttttctgttctccctccccatctactatccca

SEQ ID NO: 113 - DNA, 4690 bp, Homo sapiens
gctggccgtctgcgcaccctctctcccctcggctctttcctaggaaagctgagcctcatagcttccgggagaaggttttccggaagaaacctccagtctgtgcagtatgtaaggtgaccatcgatgggacaggcgtttcgtgcagagtctgcaaggtggcgacgcacagaaaatgtgaagcaaaggtgacttcagcctgtcaggccttgcctcccgtggagttgcggcgaaacacggccccagtcaggcgcatagagcacctgggatccaccaaatctctgaaccactcaaagcagcgcagcactctgcccaggagcttcagcctggacccgctcatggagcggcgctgggacttagacctcacctacgtgacggagcgcatcttggccgccgccttccccgcgcggcccgatgaacagcggcaccggggccacctgcgcgagctggcccatgtgctgcaatccaagcaccgggacaagtacctgctcttcaacctttcagagaaaaggcatgacctgacccgcttaaaccccaaggttcaagacttcggctggcctgagctgcatgctccacccctggacaagctgtgctccatctgcaaagccatggagacatggctcagtgctgacccacagcacgtggtcgtactatactgcaagggaaacaagggcaagcttggggtcatcgtttctgcctacatgcactacagcaagatctctgcaggggcggaccaggcactggccactcttaccatgcggaaattctgcgaggacaaggtggccacagaactgcagccctcccagcgtcgatatatcagctacttcagtgggctgctatctggctccatcagaatgaacagcagccctctcttcctgcactatgtgctcatccccatgctgccagcctttgaacctggcacaggcttccagcccttccttaaaatctaccagtccatgcagcttgtctacacatctggagtctatcacattgcaggccctggtccccagcagctttgcatcagcctggagccagccctcctcctcaaaggcgatgtcatggtaacatgttatcacaagggtggccggggcacagaccggaccctcgtgttccgagtccagttccacacctgcaccatccacggaccacagctcactttccccaaggaccagcttgacgaggcctggactgatgagaggttccccttccaagcctccgtggagtttgtcttctcctccagccccgagaagatcaaaggcagcactccacggaacgacccctcggtctctgtcgactacaacaccactgagccagccgtgcgctgggactcctatgagaacttcaaccagcaccacgaggacagtgtggatggctccttgacccacacccggggtcccctggatggcagtccttatgcccaggtgcagcggcctccccggcagacccccccggcaccctctccagagcctccaccaccccccatgctctctgtcagcagcgactcaggccattcctccacgctgaccacagagccggctgctgagtcccctggccggccgccccctacagctgctgaacggcaggagctggatcgcctcctaggaggctgcggagtggccagtgggggccggggagctgggcgcgagacggccatcctagatgacgaagagcagcccactgtgggcggaggcccccacctcggagtgtatccaggccataggcctggcctcagccgccactgctcctgccgccagggctaccgggagccctgcggggttcccaatgggggctactaccggccagagggaaccctggagaggaggcgactggcctacgggggctatgagggatccccccagggctacgccgaggcctcgatggagaagaggcgcctctgccgatcgctgtcagaggggctatacccctacccacctgagatggggaaaccagccactggggactttggctaccgcgccccaggctaccgggaggtggtcatcctggaggaccctgggctgcctgccctatacccatgcccagcctgcgaggagaagctggcgctgcctacagcagccttgtatggactgcggctggagagggaggctggagaagggtgggcaagtgaggctggcaagcctctcctgcacccagtgcggcctgggcacccgctgcctctgctcttgcctgcctgtgggcatcaccatgccccgatgcctgactacagctgcctgaagccacccaaggcaggcgaggaagggcacgagggctgctcctacaccatgtgccccgaaggcaggtatgggcatccagggtaccctgccctggtgacatacagctatggaggagcagttcccagttactgcccagcatatggccgtgtgcctcatagctgtggctctccaggagagggcagagggtatcccagccctggtgcccactccccacgggctggctccatttccccgggcagcccgccctatccacaatctaggaagctgagctacgagatccctacggaggagggaggggacaggtacccattgcctgggcacctggcctcagcaggacctttggcatctgcagagtcgctggagccggtgtcctggagggagggccccagtgggcacagcacactgcctcggtctccccgagatgccccatgcagtgcttcgtcagagttgtctggtccctccacgcccctgcacaccagcagtccagtccagggcaaggaaagcacccggcgacaggacaccaggtcccccacctcagcgcccactcagagactgagtcctggcgaggccttgccccctgtttcccaggcaggcaccggaaaggcccctgagctgccgtcgggaagtgggcctgagcctctggcccctagcccagtctctccgaccttccctcccagctcgcccagtgactggcctcaggaaaggagtccagggggccactcagatggcgccagtcctcggagccctgtgcccaccacacttcctggcctccgccacgccccctggcaaggccctcgaggcccccccgacagcccagatgggtctcccctcactcctgtgccttcccagatgccctggcttgtggccagcccagagccgcctcagagctcacctacacctgctttccccctggctgcctcctatgacaccaatggccttagccagcccccacttcctgagaaacgccacctgcccgggccggggcaacagccaggaccctggggcccagagcaggcatcatcgccagccagaggcatcagtcaccatgtcaccttcgcacctctgctctcagataatgtcccccaaaccccagagcctcctacacaagagagccaaagcaatgtcaagtttgtccaggatacatccaagttctggtacaagccacacctgtcccgtgaccaagccattgccctgctgaaggacaaggaccctggggccttcctgatcagggacagtcattcattccaaggagcttatgggctggccctcaaggtggccacaccgccacccagtgcccagccctggaaaggggaccccgtggaacagctggtccgccatttcctcatcgagactgggcccaaaggggtgaagatcaagggctgccccagtgagccctactttggcagcctgtccgccttggtctcccagcactccatctcccccatctccctgccctgctgcctgcgcattcccagcaaagatcctctggaagagaccccagaggctccagtgcccaccaacatgagcacagcggcagacctcctgcgtcagggtgctgcctgcagcgtgctctacttgacctcagtggagacagagtcactgacgggcccccaagctgtggcccgggccagctctgcagctctgagctgtagcccccgcccgacaccagctgttgtccacttcaaggtgtcagcccagggcattacactgacggacaaccaaaggaagctcttctttcgccgccattatccagtgaacagcatcaccttctccagcactgaccctcaagaccggagatggaccaacccagacgggaccacctccaagatctttggtttcgtggccaagaagccgggaagcccctgggagaatgtgtgtcacctctttgcagagcttgacccagatcagcctgctggcgccattgtcaccttcatcaccaaagttctactgggccagagaaaatgaaggaaggccacaagctcagagcccacatcaacactgcccccctcccagcaccccacagccctcacatcccctggcctggacccaggagacccaggagaaagcaccctcccttaggaatgaggagtgggcatcaggcctgggacactgctctccttccccgcccccagcctgctaagttaagtggacaggcccacaagatgaccttgcatgtgagcagatggcagagatgggtgtgtgaggggtgaggaggcatcagcagttgagccccgaaggagatcaggcagccccacctgcaggagaacgtcagccctccaggggatcagcccctgccagttccacccagctgcaggtgccagcacggcagggatgggagaggggtggggagcgagtcactgcctcctctgagcagagattcagagtaggatcacatgaataggggaaaaaagagagtctatttttgtctaataataaagaatttctataaactttagccgaaa

SEQ ID NO: 114 - DNA, 3839 bp, Homo sapiens
caggtctcgacttcactgctctgtgtcctctgctccaggaggcccagcctgtgtggccctgtgacctgcaggtattggaagagccacagctaagatgccaggaacccctggaagcctagaaatgggactgttgacatttagggatgtggccatagaattctctccggaggagtggcaatgtctggacactgcacagcagaatttatataggaatgtgatgttagagaactacagaaacctggccttcctgggtattgctctctctaagccagacctgattacttatctggagcaaggaaaagagccctggaatatgaagcaacatgagatggtggatgaacccacaggtatatgtcctcattttcctcaagacttttggccagagcagagcatggaagattcttttcaaaaagtattactgagaaaatatgaaaaatgtggacatgagaatttacagttaagaaaaggttgtaaaagtgtggatgagtgtaaggtgcacaaagaaggttataataaacttaaccagtgtctcacaactgcccagagcaaagtatttcaatgtgggaaatatttgaaagtcttctataaatttttaaattcaaacagacatacgataagacataccggaaagaaatgcttcaaatgtaaaaaatgtgtcaagtcattttgcatccgtttacacaaaacccaacataaatgcgtttatattacagagaagtcctgtaaatgtaaagaatgtgaaaaaacctttcattggtcctcaacccttactaatcataaggaaattcatactgaagataaaccctacaaatgtgaagaatgtggcaaagcttttaagcagctctcaacccttactacacataaaataatctgtgctaaagagaaaatctacaagtgtgaagaatgtggcaaagcatttctatggtcctcaaccctaactagacataagaggatacacactggagagaaaccctacaaatgtgaagaatgtggcaaagcttttagccattcttcaacccttgctaaacataagagaattcatactggagagaaaccctacaaatgtgaagaatgtggcaaagcttttagccattcttcagcccttgctaaacataagagaattcatactggagagaaaccctacaaatgtaaagaatgtggcaaagcttttagcaattcctcaacccttgctaatcataagataactcatactgaagagaaaccctacaaatgtaaagaatgtgacaaaacttttaagcgactctcaacccttactaaacataaaataatacatgctggagagaaactctacaaatgtgaagaatgtggcaaagcttttaatcgatcttcaaatcttactatacataagtttattcatactggagagaaaccttacaagtgtgaagaatgtggcaaagcatttaactggtcctcaagccttactaaacataaaagatttcatactagagagaaacccttcaaatgtaaagaatgtggcaaaggatttatatggtcttcaaccctaactagacataagaggatacacactggagagaagccctacaaatgtgaagaatgtggcaaagcttttaggcaatcctcaacccttactaaacataagataattcatactggagagaaaccctacaaatttgaagaatgtggcaaagcttttagacaatccttaacccttaataaacataagataattcatagtagagagaaaccctacaaatgtaaagaatgtggcaaagcttttaagcaattctcaacccttactacacataaaataattcatgctggaaagaaactctacaaatgtgaagaatgtggcaaagcttttaatcattcctcaagtctttctacacataagataattcatactggagagaagtcttacaagtgtgaagaatgtggcaaagcatttctatggtcctcaaccctaagaagacataagaggatacacactggagagaaaccctacaaatgtgaagaatgtggcaaagcttttagccattcttcagcccttgctaaacataagagaattcatactggagagaaaccctacaaatgtaaagaatgtggcaaagcttttagcaattcctcaacccttgctaatcataagataactcatactgaagagaaaccctacaaatgtaaagaatgtgacaaaacttttaagcgactctcaacccttactaaacataaaataatacatgctggagagaaactctacaaatgtgaagaatgtggcaaagcttttaatcgatcttcaaatcttactatacataagtttattcatactggagagaaaccttacaagtgtgaagaatgtggcaaagcatttaactggtcctcaagccttactaaacataaaagaattcatactagagagaaacccttcaaatgtaaagaatgtggcaaagcatttatatggtcttcaaccctaactagacataagaggatacacactggagagaagccctacaaatgtgaagaatgtggcaaagcttttagccgttcctcaacccttactaagcataagacaattcatactggagagaaaccctacaaatgtaaagaatgtggcaaagcttttaagcactcctcagcccttgctaaacataaaataatacatgctggagagaaactctacaaatgtgaggaatgtggcaaagcttttaatcaatcttcaaatcttacgacacataagataattcatactaaagagaaaccttccaagagtgaagaatgtgacaaagcatttatctggtcctcaacccttactgaacataagagaattcataccagagagaaaccctacaaatgtgaagaatgtggcaaagcatttagccagccttcacaccttactacacataagaggatgcacactggagagaaaccctacaaatgtgaagaatgtggcaaagcttttagccaatcctcaacccttactacacataagataattcatactggagagaaaccctacaaatgtgaagaatgtggcaaagcttttaggaaatcttcaactcttactgaacataagataattcatactggagagaaaccctacaaatgtgaagaatgtggcaaagcatttagccaatcctcaaccctaactagacatacgaggatgcacactggagagaaaccatacaaatgtgaagaatgtgggaaagcttttaatcgatcctcaaagcttactacacataagataattcatactggagagaaaccttacaagtgtgaagaatgtggcaaagcatttatatcatcctcaaccctaaatggacataagagaattcatactagagagaaaccctacaaatgtgaagaatgtggcaaagcatttagccaatcttcaaccctaactagacataagaggttgcacaccggagagaaaccctacaaatgtggagaatgtggcaaagcctttaaagagtcctcagctcttactaaacataagataattcacactggagagaaaccctacaaatgtgaaaaatgttgcaaagcctttaaccagtcttcaatccttactaaccataagaaaattcatactatcacacctgtaatcccactactttgggaggccgaggcgggcggatcacgaggtcaggagatggagaccatcctggctaacacagtgaaaccccttctctactaaaaaatacaaaaaactagccgggcgtggtggcgggcgcctgtagtcccagctatgcgagaggctgaggcaggagaatggcgtgaacccgggaggcggagcttgcagtgagccgagatcacgccactgcactcaagcctgggcgacagagcgagactccgtctcaaaaaaa

SEQ ID NO: 115 - DNA, 8262 bp, Homo sapiens
gggggacaccatgtactggctggcggcgcagggaggccggcgcccggcggggatgttgggttaacggcatggagaacagtcaccccccccaccaccaccaccagcagcccccgccgcagcccggcccttcgggcgagaggaggaaccaccattggagaagttacaagttgatgattgacccggctctgaaaaaggggcatcataaactgtaccgctacgatgggcagcatttcagcctggcgatgtccagcaaccgcccggtggaaattgtcgaagatccccgggtcgtcgggatctggaccaaaaacaaggagctggagctgtcggtgcccaaattcaagatcgatgagttctacgtgggcccggtgcctccgaagcaggtgacatttgccaagctgaatgataacatccgtgaaaacttcctgagggacatgtgcaagaagtatggggaggtggaggaggtggagattttgtacaaccccaagaccaagaagcacctgggcatcgccaaggtggtctttgccacggtccggggagccaaggatgccgttcagcacttgcacagcacttccgtcatgggcaacattatccacgtggagctggacaccaaaggggaaacccgaatgcggttctatgaactgttggtcactggccgatacaccccccagaccctcccagtgggcgagctggacgctgtctctccaatcgtgaatgagaccctgcagctgtcagatgccctgaagcgcctcaaggatggaggcctgtctgcaggctgtggctccggctcctcctctgtcacccccaatagcggtgggacacccttctcccaggacacagcttattccagctgccgcctggacacacccaactcctatggacagggcaccccgctcacaccgcgcctgggcacccctttctcacaggactccagctactccagccgccagcccacaccctcatacctcttcagccaggaccctgcagtgaccttcaaggcccggcgccacgagagcaagttcacggacgcctacaaccgccgccacgaacatcattatgtacacaattctcccgcggtcactgcggtggccggggccacagccgctttccggggttcctcggacctcccgttcggagcagtcggcggcactgggggcagcagcggtcccccgttcaaggctcaaccacaggattcagccacatttgcccacactccaccacccgcccaagcaacccctgctcctggattcaagtctgctttctctccgtatcagaccccagtggcccacttccctccacccccggaagagcccaccgccacagccgcttttggggcccgcgacagtggggagttccggagggcaccggcgcccccacccctgccacctgctgagcctctggccaaggagaagccaggcacgccacccggcccgccgccccccgacaccaacagcatggagctgggcggccggcccaccttcggctggagtcctgagccctgtgacagccctggcacgcccacgctggagtcgtcccctgcagggccagagaaaccccacgacagcctggactcgcgcatcgagatgctgctgaaggagcagcgcaccaagctgctcttcctgagggagccggactcggacaccgagctgcagatggagggcagccccatctcctcctcctcctcccagctctccccactggccccctttggcaccaactcccagccaggcttccggggccccacgcccccctcgtcacgcccctccagcaccggcctggaggatatcagcccaacacccctcccagactccgacgaggacgaggagctcgacctgggccttgggcctcggcctccacctgagccaggccccccggaccctgctgggcttctgagccagacagctgaggtggccttggacctggttggagacagaaccccgacctcagagaagatggatgagctgcagccccgcactgggcaggtcctgggctccagaccttcttctgactggctgtgccgcggggccacggctgaggctctgagtgtgtttattaactgtcaaatgggtcggagcagagccccccgccctggccagcagtcctcaggcgaggacatggagatctcggatgacgagatgccctcggcccccatcaccagcgctgactgccccaagcccatggtggtgaccccaggagcggcagccgtggcagccccttctgtggacatgagccacgtgctgggtggccagtggggcggcatgcccatgtccttccagatgcaaacgcaggtgctcagccggctgatgacgggccagggcgcctgcccctacccgcccttcatggccgctgcggccgccgctgcctcagctgggctccagtttgtcaacctgccgccctaccggggccccttctccctgagcaactccggcccaggccgcgggcagcactggccaccactgcccaagtttgacccgtcagtgcctccaccaggctacatgccacgccaggaggacccacacaaagccacggtggatggcgtcctgctggtggtcctcaaagaactcaaggccatcatgaagcgtgacctgaaccgcaagatggtggaagtggtggctttccgggcctttgacgagtggtgggacaagaaggagcggatggccaaggcctcgctgaccccggtgaagtcgggcgagcacaaggacgaggacaggccgaagcccaaggaccgcatcgcctcgtgcctgctggagtcatggggcaagggcgagggcctgggctacgagggcctgggcctgggcattgggctgcgtggggccattcgcctgccctccttcaaggtcaagaggaaggagccaccagacaccacctcatctggcgaccagaagcggctgcggccctcgacctctgtggatgaggaagatgaagagtccgagcgagagcgagaccgggatatggcagacaccccctgtgagctcgccaagcgggaccccaagggcgtgggtgtgcggcggcggccggcgcggcctctggagctggacagtggtggggaggaggacgagaaggagtcattgtcggcgtcctcgtcctcatccgcgtcatcatcctcggggtcctcaaccacctcaccctcgtcctcggcctccgacaaggaggaggaacaggagagcaccgaggaggaagaggaggcggaggaggaggaggaggaggaagtccccaggagccagctctcctcctcctcaacctcatccacatcagataaggatgacgacgatgacgacagtgatgaccgggacgagtctgagaacgatgacgaggacacagccctgtcagaggcgagtgagaaggacgaaggggactcggatgaagaggagacagtgagcattgtaacctccaaggccgaagccacgtcgtccagtgagagttccgagtcttctgagtttgagtcaagctccgagtcctcgccctcatcctcggaggatgaggaggaggtagtggccagggaagaggaggaagaagaggaggaggaggagatggtggccgaggaaagcatggcttctgcaggccctgaggactttgagcaggacggggaggaagcggctctggccccgggggcacctgcagtggactcgttgggcatggaagaggaggtggacatcgagactgaggctgtggcccctgaggagcggccctccatgctggacgagccccccttgcctgtgggtgttgaagagccagcggactccagggagccgcctgaggaaccaggcctgagccaggaaggggccatgttgctgtctccagagccccctgccaaggaggtggaggctcgacccccattgtcccctgagcgagctccagaacatgacctggaagtggagccggagccccctatgatgctccccttgccgctgcaaccaccattgccgcccccacgaccaccccggccacccagcccaccgccggagcctgagaccacagatgcctcacacccatctgtccctccggagccccttgccgaggaccaccccccgcatactccaggcctctgtggcagcctggccaagtcgcagagcacagagacggtgccagccacaccaggcggggagcccccgctatcagggggcagcagtggcctgtccctgagctctccgcaagtgcccggcagccccttctcctacccagccccgtcccctagcttgagcagtgggggcctccctcggacacctggccgggacttcagcttcacacccaccttctccgagcccagcgggcccttgctcctgcccgtctgcccactccccactggccgacgcgatgaacgctccgggcccctggcctccccggtgctcctggagacgggcctgcccctccctctgccccttcccctgcccttgcccttggcattgcccgccgtcttgcgggcccaggctcgtgcgcccaccccgctgccacccctgctgcccgcccccctggcctcttgccctcccccaatgaagaggaagccgggccggccccggcgatccccaccatctatgctctccttggatgggcccttggtccgaccaccagcaggggccgcccttggaagggaactcctgctcctgccgggccagccacagacccccgtcttccccagcacccatgacccccggacggtgaccctggacttccggaacgcggggatcccagcccctccaccaccccttcccccccagccacccccacccccacctcccccacctgtagagcccaccaagctgccctttaaggagctagacaaccagtggccctccgaggccattcctccgggcccccgtgggcgcgatgaggtcactgaggaatacatggagttggccaagagccgggggccgtggcgccggccacctaagaagcgccatgaggacctggtgccacctgcgggctcgcccgaactctcgccaccccagcccctcttccggccccgctcggagtttgaggagatgaccatcctgtatgacatctggaacggtggcatcgatgaggaggacatccgcttcctgtgtgtcacctacgagcgactgctacagcaggacaatggcatggactggcttaacgacacgctctgggtctaccatccctccaccagcctctcttcagctaagaagaagaaacgggacgatggcatccgcgagcacgtgacgggctgtgcccgcagtgagggcttctacaccatcgacaagaaggacaagctcagatacctcaacagcagccgtgccagcaccgatgagccccccgcagacacccagggcatgagcatcccagcacagccccacgcctccacccgggcaggctcggagcggcgttcggagcagcgccgcctgctgtcctccttcactggcagctgtgacagtgacctgctcaagttcaaccagctcaagttccggaagaaaaagctcaagttctgcaagagccacattcacgactggggcttgttcgccatggagcccatcgcggctgacgagatggtcatcgagtacgtgggccagaatatccgtcaggtgatcgcagacatgcgggagaagcgttatgaggacgagggcatcgggagcagctacatgttccgggtggaccatgacaccatcatcgacgccaccaagtgcggcaacttcgcgcgcttcatcaaccacagctgcaaccccaactgctatgccaaggtgatcacggtggagtcacagaagaagatagtcatctactcgaagcagcacattaacgtcaatgaggagattacctatgactataagttccccatcgaggacgtcaagatcccctgcctctgtggctccgagaactgccgggggaccctcaactaggccccggcaccagactcaaaggatgtcagccgtagccctgggactcccgagcgtggagcccctggccccggggcccggccccccgcgcccgcccccatttcaggtgctgtcctctacccagcggccattcagggcctggcgccccacactaccccctggagcccctggctccggcccctccgcgggaaagggcttctctgtcgttcagcccacgtctctctcattttaacaaacgcccctttcaggatttctgtttaactccagcatcagcttctctctctccgtctctcctcccctctctctcttctctgtctcttctctctcccaccatcaccctcggcctcttcctgtgaatgctgctacgttgttttgtcttctctatttttttcctcgttgtgagaaaagacatttaaccgttgaaatgtgaaggtggaatcagagaggggccccgcgggggtctgcagaggcctcagtgtggctgtgcgtggcccgtgtcctggaagccacccggacctggacgcagggccaggtgctgtgggaaggatggaggcccccacggccttgacctcagaacactacgccctgaaagcgcccctcactgcccgtgggcacagtgaggagaccccacacctttccccacccgagctgcagcctgttccttccccagaggcctggggcaccactgacccggtggaccctgatggagctaagctgtcccaggcaggggtctccgctctgggctttccctgccacctcacaccccagcaccccctaaaccttgggttcaatgtttactttctcattcggatgccagcaacgcgggagcctctcggaggccccagtgcaggtgaggggcgctgagaacgcgggcagccactctcttctgcccttgccttcgccctgggtgggacagggctcccaagggcaggcgggtcccccagtcccgccattacgggttgtcagaccgtctgcgtgtggcattttttggcttataagcttcacccactcacccccaacccacaccccacatccccctgccggcagcccctcaacctaagaaggccagagcatatttattttcggagggagcagattacttctcccagagaaaggaaaatcttggaaaagatttaaaaacacaaatctaagccttgacggtttttttttcccttttgacccccttcccatctcttcagaatttattcccatggcttttttttttcttgtgcgtgtataaaatcaaaaggaaggggaaaaaggtttttgaagttcagaaccaacttctgtatatagaggctgccgcaaaggactttctcttgggaacattgtttcttgtagaaacatgcgggaagacattttttgctcatttctttgtacttccaaaaaaaaaggaaaaaaaagacaaaagcaagtccccccgtaccccagaaagcagaggaggcgtgtaaataatttctggaaagtgactgttgtgacccggagtcctcatcaagatgagcgcgctccatgagggagctgctcccaccctgcggacgcaggcggccggagcctctggtatctcagcttgtgtcaagcttgttatcatgtaaattctgtacaaagaattgttatttttctcttttttgttgttggtggttttgttgtgtgttttttgttgttttttttttattcctttcccccaggccctctctatttgagactgtgcccgccggtttcaagatcaaggaaattggtggcaacaagacacagatggggtacctgggcacagcggcgaacttctcttccgtttgcggttttctgcctaattgtgcaactgaggaaataatttatttttcacatgaggaaatgcgtagcttgtagagacggctgattcaagttacatgtacagcctccaaagggctgtctccattctgtccccttcccataaaagaagtgggggtgttcgagaagaccagggaagggacccttgcctcacccctccccctggcctcaccttgctcccagccatcgtgcccagtgttaacctcggctggccttcactaaggggactagacctccctctccccaggagccccagccccagagtggtttgcaataatcaagatatgtgtcgagtcatttttctttcaactccctcatttttcattgaacaaatctctgcttttcaagagttgggggtttctgctattttttgctttctctccctccccctgcaaagatgagaaccaatgagttttagggatgtttgtgcgggtagactccatcatccatatgtaacttgttttgaagagaagtgtttccgttgtgtgtcttgatgtaaatatttgttcatatttttgtgaattcaatactatgtaccattgtattatagtaacttttataaagcaaaccataaatatactgacttttcttacag

SEQ ID NO: 116 - DNA, 1245 bp, Homo sapiens
ataagagaccacaagcgacccgcagggccagacgttcttcgccgagagtcgtcggggtttcctgcttcaacagtgcttggacggaacccggcgctcgttccccaccccggccggccgcccatagccagccctccgtcacctcttcaccgcaccctcggactgccccaaggcccccgccgccgctccagcgccgcgcagccaccgccgccgccgccgcctctccttagtcgccgccatgacgaccgcgtccacctcgcaggtgcgccagaactaccaccaggactcagaggccgccatcaaccgccagatcaacctggagctctacgcctcctacgtttacctgtccatgtcttactactttgaccgcgatgatgtggctttgaagaactttgccaaatactttcttcaccaatctcatgaggagagggaacatgctgagaaactgatgaagctgcagaaccaacgaggtggccgaatcttccttcaggatatcaagaaaccagactgtgatgactgggagagcgggctgaatgcaatggagtgtgcattacatttggaaaaaaatgtgaatcagtcactactggaactgcacaaactggccactgacaaaaatgacccccatttgtgtgacttcattgagacacattacctgaatgagcaggtgaaagccatcaaagaattgggtgaccacgtgaccaacttgcgcaagatgggagcgcccgaatctggcttggcggaatatctctttgacaagcacaccctgggagacagtgataatgaaagctaagcctcgggctaatttccccatagccgtggggtgacttccctggtcaccaaggcagtgcatgcatgttggggtttcctttaccttttctataagttgtaccaaaacatccacttaagttctttgatttgtaccattccttcaaataaagaaatttggtacccaggtgttgtctttgaggtcttgggatgaatcagaaatctatccaggctatcttccagattccttaagtgccgttgttcagttctaatcacactaatcaaaaagaaacgagtatttgtatttattaaactcattagtttgggcagtatactaaggtgtggctgtcttggattcagatagaactaagggttcccgactctgaatccagagtctgagttaaatgtttccaatggttcagtctagctttcacagtttttatgaataaaaggcattaaaggctgaaaaaaaaaaaaaaaaaa

SEQ ID NO: 117 - DNA, 7380 bp, Homo sapiens
cggaactcgcgggttcggagccgcccgctgaggtcagaaggaggcgtctgcgctgatcgggtccgccgcgcgccagagccagagtcgcagccgaggggagccggggccggagcccgagcccgagccgagccggagcccgagcgagcggcggagaccgtgcccccgcctcggccccgcgccgccgcggccaggcccggcatggaggaggagtgccgggtgctctccatacagagccacgtcatccgcggctacgtgggcaaccgggcggccacgttcccgctgcaggttttgggatttgagattgacgcggtgaactctgtccagttttcaaaccacacaggctatgcccactggaagggccaagtgctgaattcagatgagctccaggagttgtacgaaggcctgaggctgaacaacatgaataaatatgactacgtgctcacaggttatacgagggacaagtcgttcctggccatggtggtggacattgtgcaggagctgaagcagcagaaccccaggctggtgtacgtgtgtgatccagtcttgggtgacaagtgggacggcgaaggctcgatgtacgtcccggaggacctccttcccgtctacaaagaaaaagtggtgccgcttgcagacattatcacgcccaaccagtttgaggccgagttactgagtggccggaagatccacagccaggaggaagccttgcgggtgatggacatgctgcactctatgggccccgacaccgtggtcatcaccagctccgacctgccctccccgcagggcagcaactacctgattgtgctggggagtcagaggaggaggaatcccgctggctccgtggtgatggaacgcatccggatggacattcgcaaagtggacgccgtctttgtgggcactggggacctgtttgctgccatgctcctggcgtggacacacaagcaccccaataacctcaaggtggcctgtgagaagaccgtgtctaccttgcaccacgttctgcagaggaccatccagtgtgcaaaagcccaggccggggaaggagtgaggcccagccccatgcagctggagctgcggatggtgcagagcaaaagggacatcgaggacccagagatcgtcgtccaggccacggtgctgtgagggccccgccgcttgcccgtgacacgcagcgcgttggtgtctccgtgtttgtccctgtgaaaacatgtaacgtctgccttagagccatgaccgaaacttgatatttttttctttcatgagtgtccggcatctgctggtcttcattgtgaaacgtgccagtcgtgctttgtgaaaaataacaaagtggtcacagaaatttgtgatctgaaaacccggctcccttccccacaaggctcctgggcctccgggaagacgggcccctgtttgccatctcgggggtgttccctgtgggagggtgagtgggtgaggccgagcctgctgcgtgtggagcctcgagtgggccctggctgccactaccgtacagaggccgtgtcgcgctgggctgggcctgggtggcctctgtctttgcatctctgagaaggagtcgggtggtaacggttggggtcaggaagaattctgccaagtatctttactgtcattctgaccatagcctctttgttcccgcattcgaacttttggttcttactttgctgctcgtttagtccctggggatttcagatcttaggctgttgtttcaccgtatgggagggttgatgtgagcttgcttggagacacacggtgcagcatcagggaccttcccaggccccagcaaattcaagtcggtctgcagacctctcagctacccgcgggacctcttgtaacccatcggcatcttccaggaatccgccgagtgacttgaggaagatgctaacgcagtaaggtctgtgctgggccaagagcagctttgaagctccagagaaccaccccgtcaggttccttgtggaagctcccctcatccgtggtgcagcaggctgagcactgcgcgtttgccacgtgctgcccgtgacagcacattgagccacagcatttgtagacaggacagaggggtgcctgccccctgcccctgctggcacatttaacccttgtcccctgacctcagttctgtgccccaccaaatgcccaggggcaagaggccaccctggaagctgccaatcttccaaggtgggtgtggggcacggtgggggcgggcagctcccaggcccttgggcaggctggggtgacggcagaggccacagcaccagctctgacaagtcctatcatcctctgctcagcagtgacctccctggccccactttgcccagagtttggggtccccccaggtatagctataggcggcagtgcctgtccctggcctgccttgatttcagccacacccctgcagccctgcatcccagctctggggtgtgcagaggtttgtgtctccagggaacccacggctggagagaaatagggagatgcaggaagtgggggcccatggggcccccaagaagcggactctccaaggggtacccccaccccgctaccttccccacggacgggcccctcctggagcccataccctcctgtgaggccattccagtgtcttctagaaagactcgcttgccaggagtgcgttctttgttgaaaaatgccctgaagcgaaaagatgcaggtttatatggaacccccaccccctcccccactctcccactctgttcgttctgaatgtcttcacgagcgtgcatcagggcgcctggctcccccacctcagccagtgagtcagacacgggtttcgcagccatgtttcctggctccgaggacacgggtggcaggcccgttgcagcccagagccactggtccctacagggcgccgccacaccagcaggaaggaggatggctgtgtccggagcctggcggggaggcggcctccccagtatgtgagtgcagggatctgccagaaccacctggccctctgtagggcgtttaactggaaataccctcactgccaagtggagactggggcgtgtgccacattgccagccaccaggaaagcttttctttttcttttttttttttttttaaacaccaagagcacgtatagcatgggggaaagaacctaaatgtctctctgtcctgtgagctggtgaaaaacccagcatgagaacgcagtgtcaggtgtgggactccttctgcccctgcagtgggtgttacgggcggtgtgccctggcgagcaagctttgattcttggttctttgagctcgtttcagaggctgagtccccacatcagctttagttcttggacttccctgtattaagcaagaattaggagaatggctgtccctgcaggcgcctcccgtaaatcctgagctctctggcgcaatctgaaacttctcttctgttttctttggctgtatcagccgaaccaggagaggcctgggctgcgactaaggagaaagaaatcgggggtttctgagagcagatggtgcctttgtgggtgcagggcttttgtggaaattgtcagcctctacgggcagagtccggcatcccctccccagactgcctgctgtcaaaccacggagcagctggagcctgccctgtccacggcccgtttccacccgggcatgttcgtctctcatgacttcggcagaggcccctggtggccttcagtttcagtttctcatccaggaaggtaaccttgggcattggcagtgggtttccctatggcttggatccagattagaattgatctttgttttcactttccatagttaataacatgcaaaataatgagaagaatttattttaaggtgacagctatactggtccaacatcgcctgcttattgtcagggtacagaagtttaatactttcttaatccagtttttcaaacttctccctgtagaccgtaaggatgaattccacaataggatcctttttaaaatcgattttaaattgttgcctagtcctgccaaggttattatgtgcatctgttatttttccaatacatgtaaacagttgcagcatgatgctttgtttaatgtcctgttcttaagctcgttagagccagttttgaaacgtttggtcttaccgtgaacggaggctggcttggcttagccacgctgatgagtaagtgagggatgtctccatcttgagatcaccaggcaagagagttgcctgcaccaggtaagaggccaaagcccctggggtaacagtccccaccgctacccgaggtaaaacaataaaagctatgtggttgagctcaggcctctcgtgcctggtgtcagagaaggcagagcccacagtaggtgcagggtgcaaggccctgggagggcactggccagggaaggtggtatagatggccctcagattgcggggccccgagcagctccccactctgcccgtccaccttccctggctccagcctcattctctctttagtttaactatgcaaagagaggaggttgagagtgttctggcagctggagctcttttccttgtccttcctgccctccgatggggccacctgtgtcggggcagcagtgtccatgtttatggagatcagaggtgtccccactgtgtggctggactgtactctgctgcccgggtagccaggagtctctccctctctcccctgccgcctgcctggtctcatgggcctccttcacacacccctccctgtggatcgcctgcctgggcccagagcaggggaactggagtttgtgagtgagcagagcaggttatgtgcagacagggaaacgagaactttggacctggctttctgagtccaggtgagagctgtgtggccccccgatgccactctgcccgccggagggatgtgcctgctgagccttttccttccacgccgcctctcactgccaggccagcggcttccgctgagactcgctggagaggcggctcccgtgtccgtccaccgagcactcagatggatgctgatcaccagggccgagggggctcccagaaggaccccaggccctggggagggtggctgtgggaggccaagtccactgcccggaagtcttgtcagccctaagccagggaagcctggagcgtggcctggcgggtctgggtggacaccgtccccactccggactcccagcacaggggaggatacctgagcctgtatggccctgtagccctgggcagagctgggcctgtcgtgtgttcctgcctggcaggtgcaggtgctggccatctgcaggtggaaggaggtgggaatcttggattttttgtttttttttgtctttttttttttgagatgaagtctcgctctgacacccaggctggcgtgcagtggtgtgatctcggctcactgcaaactccgcttcctgggttcaagtggttctcctgccccagcctcccaagtagctgggattacaggcatgcgccaccacgctcagctgatttttgtatttttagtagagatggggtttcaccatgttggccaagctggtctcaaactcctgacctcaagtgatctgcccgcctcggcctcccagagtgctgggattacaggcgtgagccagtgcacccggcggaatcttggaatttttatagacagcacctcagtttctgactccagccgcacacctcctgcctctgccagcaggggttgccgccagaccagagccagggccaggtccctgcgtccatcccccccggtaggatggacgtgagccatccttctaggggacttttttcagtgtgcgactcgtctctgttaggtggtaggagccagtttgtgtggcctgtgccacgctccacagtgcgtggctgggctctgtgtgtggcctgtgtcccctgtccctgcaggacccagcaggcatcgtggcgtgacagctgtgtccaagccactgcccgggcatcccatcacccaccagggtgcacggtctctcctgctgggggctttctgtcgcatgtgtgtctcctgtcgactctgcagtttgttctcagagcagaatgtttcctgttctcagtgcacaaagacactggttttcaatcggcgtctaaaaccacgttcctgcctttcattgcaacacggtgtgttcatttgtttaaaacagtttaatgagtaagtttagatgactggtcaatatcttaaaaatgtatattagtaagaagttcttcctggaatttttctttcgattctggcagaataaacaggtgtttttagttttcccactgtctgagccaagcaggaccctgtcccagagcaagagatgtccccttccatctctgacccttgcctgggacaagctttgatggggggccccagcttcaaggctgtggtgggaacagcacccccaaatgccagcctctcctttcttcccatccaccagtatactgcggggccatttctggtctttgtccaacaggaaacccatttctggtgggatatgccttccagtgccacagggccactcaccccatgcatctctgtcctgcccgtcagtgctgggacggacagcaagggcaagcccagtgtctggcggataggtgggtgggaacagagaggggagaatgccgtcctaagcttctgcttggggatcccccacacgacctgggtactgcctgggaaacctgtcctaagtaaaactatggacctcgcctcgcccaccggcctgcgaagccagcatctccgtgaaggtggatggaagcgcctttgtcctcattttgagctgcaagctgggtcagcggctctgaagccctcgagtgactttctaacccaagacccagcccctggcaggaggagggtgggtgcagggctggtgggacaaaaagaggcctcagcaggcctggaagacccttccagtacatcccacagcgtgtcgagcagctgggagaacctgtgtcaagctcgagccgtcataggtccccatgaggtgtctgaagccccttcttggtgatgggaggcagaggtgctgacgttctggagcatggacgtgagtcctcagctggctccgcgtgggcccttggagggtgccaggtgtgtggtgaccttctggatgcctttaacttcatggctgcgtcattcctgatttagaactttaaccggagcttcatctagtgattgcaaaactggaccaatgggaggacggcggcgcagcccgctccctccgtggaatggagctcagctcttcggaggcatcaaagcacctgtcgcctccgtggtccccctgctgagggagtgcggcctctgcaaggttcgggggtggcttcgtttgcctggagtggccggccctgcttgtgccatgtggatgtttgtgagcctcggtcctacagcactgtgtaggctgcatctgtttcgtgctggtcctgttgacttgtatgatatccacaaataaatattttcatggcggtaaaaaaa

SEQ ID NO: 118 - DNA, 802 bp, Homo sapiens
accaccatgaatctacttctgatccttacctttgttgcagctgctgttgctgccccctttgatgatgatgacaagatcgttgggggctacatctgtgaggagaattctgtcccctaccaggtgtccttgaattctggctaccacttctgcggtggctccctcatcagcgaacagtgggtggtgtcagcaggtcactgctacaagtcccgcatccaggtgagactgggagagcacaacatcgaagtcctggaggggaatgaacagttcatcaatgcagccaagatcatccgccaccccaaatacaacagccggactctggacaatgacatcctgctgatcaagctctcctcacctgccgtcatcaattcccgcgtgtccgccatctctctgcccactgcccctccagctgctggcaccgagtccctcatctccggctggggcaacactctgagttctggtgccgactacccagacgagctgcagtgcctggatgctcctgtgctgagccaggctgagtgtgaagcctcctaccctggaaagattaccaacaacatgttctgtgtgggcttcctcgagggaggcaaggattcctgccagggtgattctggtggccctgtggtctccaatggagagctccaaggaattgtctcctggggctatggctgtgcccagaagaacaggcctggagtctacaccaaggtctacaactatgtggactggattaaggacaccatagctgccaacagctaaagcccctggtccctctgcagtctctataccaataaagtgaccctgctctcac

SEQ ID NO: 119 - DNA, 4932 bp, Homo sapiens
cagaaatgcaacaagtagtacccggggtctgcagagcgccccgcgccgcctgacttggccgggcgaagcccgcctgcagagacccgggccggcctccggacaaaggacggaggaggggctggacggcgctgcgaagtccgaaacaggccatttagcgactctggccaggctaaggggaatgcagaggagacacagagccggcgggccaagaggacgatccggccgctgcacgcagggcgggaggcgatggaggctgcccgcgccttgcgcctcctgctcgtggtgtgcggctgcctcgcgctcccgccgctggccgagcccgtgtgcccggagcgctgcgactgccagcatccccagcatctcctgtgcaccaacagggggctccgcgtagtgcccaagaccagctcgctgccgagcccccacgacgtgctcacctacagcctcggcggcaacttcataaccaacatcacggccttcgacttccaccgtctggggcagctcagacggctggacctgcagtacaaccagatccgctctctgcaccccaagaccttcgagaagctctcgcggctggaagagctgtacctggggaacaacctcttgcaggcgctcgccccgggcacgctggccccgctgcgcaagctgcgcatcctctacgccaacgggaacgagatcagccgcctaagccgcggctccttcgagggcctggagagtctagtcaagctgcggctggacgggaacgccctgggggcgctgccggacgcggtcttcgctcccttgggcaacctgctctacctacatctggagtccaaccggatccgctttctgggcaagaacgccttcgcccagctaggcaagctgcgcttcctcaacctctctgccaacgagctacagccctccctgcgccacgcggccaccttcgcaccgctgcgctccctctcctccctcatcctctcggccaacagcctgcagcacctcgggccgcgcatcttccagcacctgccacgtctcggcctgctctcgctcaggggcaaccagctcacgcacctcgcgcctgaggccttttggggcttggaggccctgcgcgagctgcgcctggagggtaatcggctgagccagctgccaactgcgctgctggagcctctgcacagcctggaggcgctggacctgagcggcaatgagctgtccgccctgcacccggccaccttcggccacctgggccggctgcgcgagctcagcctgcgcaacaacgcgctcagcgccctatccggggacatcttcgccgccagcccagccctttatcggctggatctagacggcaacggctggacctgcgactgccggctgcgaggcctgaagcgctggatgggcgactggcactcgcagggccggctcctcactgtcttcgtgcagtgtcgccaccccccggccctgcgaggcaaatacctggattacctggatgaccagcagctgcaaaatggatcctgcgcggatccctcgccctcagcttccctgaccgctgaccgcaggcggcagcccctacccacggccgcaggggaggagatgacgccacctgcaggtctcgcggaggagctgccgccgcagccgcagctccagcagcaggggcgatttctagctggggtggcctgggatggggccgccagggagctggtaggcaaccgcagcgctctaaggctgagtcggcggggcccgggcctccagcagcccagcccctccgtcgctgccgccgcgggcccggctccacagtccctagacctgcacaagaagccccagcggggccgtccgactcgggcagatcccgccctcgcggagcccaccccaacggcctctcctggctctgcgccatcgcccgccggcgacccctggcagcgcgcgacgaagcatcgtctgggcacggagcaccaggagcgtgccgcccagtccgacggtggggccgggctgccgccgctggtgtccgacccatgcgacttcaacaagttcattctgtgcaacctgacggtggaggcggtgggcgcagacagcgcctcggtgcgctgggccgtgcgcgagcaccgcagtccccggccgctgggcggcgcgcgcttccgcctgctctttgaccgctttggccagcagcccaagttccaccgcttcgtctacctgcctgagagcagcgactcggccacgctgcgcgagctgcgcggggacaccccctacctggtgtgcgtggagggcgtgcttgggggccgtgtctgccctgtggctccccgggaccactgcgcggggctggtcaccctaccggaggccgggagccggggcggcgtcgactaccagctgctgaccttggccctgctgacggtcaacgcgctgctggtgctcctggccttggcggcctgggcgtctcgctggctgcgtaggaaactgcgggctaggcggaagggcggggccccggtccacgttcggcacatgtactccacccgacggcccctgcgctccatgggcaccggcgtgtccgccgacttctcgggattccagtcgcaccggccacgcaccaccgtgtgcgcgctcagtgaggcggacctcatcgaattcccctgcgaccgcttcatggacagtgcgggcggcggcgcgggcggcagcctgagacgggaggaccgtctcctgcagcgatttgccgactaggtccagggcatatagagaccatctcattggccctaaggagccgcctctccgtgaggcccaccagcccacctcaggggaagtgccgttttgtgcacttgccagagaggccggtggggacagagggccaattcgggcaccatcccccaattcccaatactcgagaagtaaatggatggtacttggtggtcagagccagagtaggggacaaatggatggtgggatgctgaggtcggaggcttcgcttggaggctttgacacagctatgcgaatggcttttgtagcactgcaatgcagaagccaggctttgggggtagaaagggggtgcttgtgcccccaacatggccagaaatatttgggtgcatgctttttgtttgctcagtgtcaaacagagaagttttgtttctatttaaggaaggaacttattaccattacaaaggaggcttggccagggactccactggtttggtgatctctgccaagaagggggatgtaaacaggtggtaaagtttaacatacccgccaaggaactcgtttatgttggctgatagagcattcaggataccttaaagtttaataagagacgcattttttttttcaaaaatgtgaaaagctctgacatttaacgaactgaccaatagactcaaggactgttttagttggactgggccattttattatgttccttttaatattaacagtacaagagcgcttgctgacttcgaggataactaagattacatactttctcaggagaaggctgcatgcaagacttctctgtcagggttgctcctgtggcttttttaattttatttttttaaacctatatatggaaaaggaaatttcaatgccagatttgataaaagaatgtgatgtatatgtagctgatgacccactggggaacaccagtgttccagttcacttaccacatctgtgacagtgtgtttagattggaataaatgtgatgcattacttcttatgtttttatcagtgacatggttgactgtgccctaattctcttgagttgcagttaagcaatgaaggttatttcctaatagggaagcaaaaggtgattgtcaattgatagtttaatgtttgaccacattagtgtctttatatgaaatagtagaggggaagaaattatagaaaacaaatgtgaaaaaaatacaccagtgggtatctgttctactaaaaccagaagattgttatgagtacttaaacctcactgtgaaataatgatatattttgcaattaatccctccccaactgagtgtcttactgtgttattaaatcttatcttttagttaatagttgcagtatttcttttaaatgtttttgttttaaacttaggggtaggatcctttatttgttcagttgtttccaactatttgggatactttcattccctgctatttatgaagtacatgtttatcactaagtgtagtggtttggtttacattaataattttatgtgtggtctaaaaatgcagtcactaagagaatgtacactgtggttatggtcacagtggttatggatttattggcagtggagtaccatggaggtcactgcaatggtgctaaggctgacagtggaatcttctgtttagggccttaagcccctgagggtcctggtgactcagggaatccatcacagccccgggtctttcaccccagttcactccttttatgtttggcctagattgacccatgcctgccctcttctcaacagctgagtagggaaccagccatctgaatgagctgatcgttgtttatgttcaaatgagtaaatgtccagaccacttaaaactacagctgcttttctggcagtctcgtctgcggggccaaaacttaataaaccacaggaaatagactgtcattcttagtttgctgccagggcttattttagattgagagcatactggtacatgagagcagtagtgttgtttgctcttattttcaaccagggagctatctggcaccttttgtgctcctggcttttttcaatcatagcactattgcatctcctagctatttcttttgcccagcagggtaatattgagtcccattgcaagtatggacaaggcctctggttctcctcaccacccaccttttcagccatagaacatcactgaaaatgcctaatgcctggatctgtgttctactttagtttcactgggaagtctttcagtgggagatgaataaatgttatacattgttatgtccagttatgtcaataaacccactaatagagat

SEQ ID NO: 120 - DNA, 4751 bp, Homo sapiens
ggttgtagtggtggcttaggaataccctcccggctatcgcttcagtgggtagaggggaccactgcccgagagctttaatggagctgggtcctgccttcgcgctgaggagccctcgttttcgagatcaggcctgaccgggataagctccagaaacagtattatgtctcagtcctgtgcaaagtgagatgagctgtagcctttggagacctataattttgaacatagatgttccttaaaagctaaatctttttgaacagatgatgataaacctggaagctgttcttgaagactaattagttacactggatatgctgctgttctttactttgggattgcttatacattttgtgttcttcgcctccatctttgacatttattttacatctcctttggttcatggaatgactcctcagtttacaccattgcctcctccagcgagaagattagtgttgtttgttgctgatggccttcgagcagatgcactttacgaattagatgaaaatggaaactctagagcaccgtttattaggaatatcataatgcatgaaggcagctggggcatatctcatacacgtgtgccaacagaatctcggccaggtcatgtagctctgatagctgggttttatgaagatgtcagtgcagttgccaaaggatggaaggaaaatcctgtagagtttgattctctttttaatgaaagtaaatacacatggagctggggaagcccagatatcctgcctatgtttgccaaaggtgctagtggagaccacgtttatacatatagttatgatgctaaaagagaggattttggtgctcaagatgcaacaaaactggatacgtgggtttttgataatgttaaggacttctttcatcatgccagaaacaaccagtctttgttttctaaaataaatgaagagaaaatagtttttttcttacatttattaggaatagatacaaacggacatgctcatcgaccatcctcgagagactacaagcacaatattaaaaaagttgatgatggagttaaagaaatcgtgtctatgtttaaccacttctatggaaatgatgggaaaacaacatttatctttacctctgaccatggaatgacagactggggttcccatggggctggtcatccttcagagactttaactcctttagtcacttggggagctggaatcaagtatccccaaagagtatcagctcagcaatttgatgatgcatttttgaaagagtggagattggagaattggaagaggctagatgtcaatcaggctgatattgcaccattgatgacttcccttattggagttccctttcctcttaactcagtgggaatccttcctgtggattatcttaacaacactgatctcttcaaagcagagagcatgtttacaaatgcagtacagattcttgaacagttcaaggtgaaaatgactcagaagaaagaagttactttaccatttttgtttacaccatttaaactgctttctgattccaaacagttcaacattttaagaaaagcaagatcttatataaaacacagaaagtttgatgaagtggtctccctttgcaaggagctaattcatcttgcattgaaaggattgtcctattatcacacatatgacagattctttttgggcgtcaatgttgttattggttttgtgggatggatatcttatgcctctttgttgatcatcaagtctcattccaaccttataaaaggtgttagtaaagaagtgaagaaaccaagccatctcctgccttgtagttttgtagctattggcattttagtagcattttttctgctgattcaagcctgtccctggacatattatgtatatggtttgttgccactgccaatatggtatgcggttctaagagaatttcaagttattcaggaccttgttgtatcagtgttgacctatcctctgagccattttgttgggtacctgttagcctttaccctgggaattgaagtattagttctcagttttttctaccgctatatgcttaccgctggacttactgcctttgcagcttggccatttctcactcggctgtggactcgagcaaagatgacctcactgagttggactttcttctctttgctcctggcagtgttcccactgatgccggttgtaggtcgaaagccagacatctctctagtgatgggtgcaggcttgctggttcttctgttatccctgtgtgttgtaacatctctcatgaaaagaaaagatagctttataaaggaagagctattggtacatctgttacaggtgctgagcacagtgctctccatgtatgttgtgtatagcactcagagtagtctactcaggaagcaaggactgcctctcatgaatcaaattattagctgggcaacattagcctcttccttggttgtgccactactgagttctccagttctctttcagcgattgttcagcatacttctttcattgatgtcaacctacctacttctaagcacagggtatgaagctctctttccactagtgttgtcttgtttgatgtttgtctggataaacatagaacaagaaactctacaacaatctggtgtttgctgtaaacaaaagctcaccagtatccagttctcttataatactgatataactcagtttcgacagctatatctggatgacatccgtagggcctttttccttgttttcttcttagtgacagcattttttggaactggaaatatagcttctattaacagctttgatcttgcctctgtctattgctttctgactgtgttcagtccttttatgatgggagccctgatgatgtggaagattttaatcccctttgttcttgttatgtgtgcttttgaagcagttcagttgactactcagttatcgtcaaaaagcctttttctcattgttctcgtcatatcagacattatggctttgcattttttcttcttggtcaaggattatggcagctggcttgatattgggacaagcatcagccactatgtgattgtcatgtccatgaccatctttttggtgttcctcaatggcctggcccagctgctcacaacgaagaaactcagactatgtggcaaacccaaaagtcacttcatgtgaggttgctgaagcaccattcagcatctggatcctgattctccttttaagctaaaatctcatcaaggcttcaataagaagatggatatggatatatagtatattctactcctgtaaggaaaatggtatttggaattccgaattgacaggttatctggaacaaaggagcttctttttttttctaggttttgcaggcatgaaatagtgattatatctgtggaaaagcataggaaggcattctcctttttcatttttttcctttggctggcagctcttcccagtgatgttgagagcacctgcagcaatctggtccccagtcgcacaacttcccacatacccagaggagagcatatgcctgtgggggcagtgctgatggcatccagagtcattgctgtggctgagctggaaggaaatcaccaggtgccaccgtcaatatttatcagctttcagcactggttttgttagacagtcagggtgtattatttcaagagcttcaataaaaaaagtgtttgcaggtatttgtcatatttctttagtatgcaataatgctatcttatcctttttagtgctatttctcaggttttctcagtcaaccagctagatgcatgtgatgcatgtctatccttcactttttttttttcatttctggattttcctgggatttctgacaacacaaaagtagaaagtgcttggtatttctgtcttatacataggaaaacatttaaaataaatagtttttaattgtaggctcaacatctgttaccccatagctttttcgtatattgtttctttccctttgaatttctttttactgtcatctattattttaacaggagttaaaataactcctgttaaactttctgacaatatcataagaattcatattaaaggtgttattctttctggttgtgagattctagcacaaaggcctaaaatcatcaaattagatttccatttgtaaacaaattctaatgggcaaaatatcttgagagcagtttttatatggattatccataaaatgacctttacatatccctgcagagttggccttttgcccgtggtgtgctagtagctttggctgatgctaagctttcctggtatgcgccctatttttaagaagtaattgcttttgaattaagttatagcattactaattcatgttaatgactaggaaaccctctgtaatttacaagatttttcaaattggtggggagtgaataaatacaatttaaaagtcagaaatcagtttggcaaagtgtactttcttaatttctatttatgatgaagtatagtcataatttatttgtaatactactttatggtataccagtgaaagaactgtagtataaaaaagaggtattaatgttttatgaaatctcatgcatcagttcatagcataaaatctagctggacaactaagaagctatggtagcaaacagtgatgttgatggaatgagaatcatgaactttcatattacctcaaaggatttttttatcagtttttttcacacatcagaaaaaactgactgtataaacacttatcactgacctttttctatgtgtagttttgccttttatcttttcccaaatttttataaagagaaattaataaatattttattacaacattgtaaaaaaaaaaaaaaaaaa

SEQ ID NO: 121 - DNA, 3265 bp, Homo sapiens
gcgtgcacgctgacgccgcgcagtctcgtcccctgccgccgccgtcgccgctgctgtcgccgccgccgccgccattggagtcgacgcctcctcagtgcgtccgcgtcccgggctcaccgccgctgccgcctcgccaggggcccgcgcgcccagcagccgccgccgccgcccggccggcgcccggggaattggcggcggggcccggggccgcgcgagctagggtgacaggcccggcctctaggggaggcccgagccggcgggcgccccggccccgcgtctagttgttcatgaagcatgtcggccaccagcgtggacacccagagaacaaaaggacaagataataaagtacaaaatggttcgttacatcagaaggatacagttcatgacaatgactttgagccctaccttactggacagtcaaatcagagtaacagttacccctcaatgagcgacccctacctgtccagctattacccgccgtccattggatttccttactccctcaatgaggctccgtggtctactgcaggggaccctccgattccatacctcaccacctacggacagctcagtaacggagaccatcattttatgcacgatgctgtttttgggcagcctgggggcctggggaacaacatctatcagcacaggttcaattttttccctgaaaaccctgcgttctcagcatgggggacaagtgggtctcaaggtcagcagacccagagctccgcgtatgggagcagctacacctaccccccgagctccctgggtggcacggtggttgatgggcagccaggctttcacagcgacaccctcagcaaggcccccgggatgaacagcctggagcagggcatggttggcctgaagattggggacgtcagctcctccgccgtcaagacggtgggctctgtcgtcagcagcgtggcactgactggtgtcctttctggcaacggtgggacaaatgtgaacatgccagtttcaaagccgacctcgtgggctgccattgccagcaagcctgcaaaaccacagcctaaaatgaaaacaaagagcgggcctgtcatggggggtgggctgccccctccacccataaagcataacatggacattggcacctgggataacaaggggcctgtgccgaaggccccagtcccccagcaggcaccctctccacaggctgccccacagccccagcaggtggctcagcctctcccagcacagcccccagctttggctcaaccgcagtatcagagccctcagcagccaccccagacccgctgggttgccccacgcaacagaaacgcggcgtttgggcagagcggaggggctggcagcgatagcaactctcctggaaacgtccagcctaattctgcccccagcgtcgaatcccaccccgtccttgaaaaactgaaggctgctcacagctacaacccgaaagagtttgagtggaatctgaaaagcgggcgtgtgttcatcatcaagagctactctgaggacgacatccaccgctccattaagtactccatctggtgtagcacagagcacggcaacaagcgcctggacagcgccttccgctgcatgagcagcaaggggcccgtctacctgctcttcagcgtcaatgggagtgggcatttttgtggggtggccgagatgaagtcccccgtggactacggcaccagtgccggggtctggtctcaggacaagtggaaggggaagtttgatgtccagtggatttttgttaaggatgtacccaataaccagctccggcacatcaggctggagaataacgacaacaaaccggtcacaaactcccgggacacccaggaggtgcccttagaaaaagccaagcaagtgctgaaaattatcagttcctacaagcacacaacctccatcttcgacgactttgctcactacgagaagcgccaggaggaggaggaggtggtgcgcaaggaacggcagagtcgaaacaaacaatgagggcgaaccagtttcttacatgttctaacgtttgactttgaaaacagtttaaaacacgtgtgcttggtcagctccagtgtgtcgtcccgtgcgggggttgagtgttgcatctttgcctttcttgtcgttgatttttgcccagatggatctgcatttatttgtactttttctatgtattataatcctgtagaagtcactaataaaggagtattttttttgtcagcttatcaatcagactgatctaatgtgaaatgtaagtatccttaaaaacaaagcatctattttggcagaaattgtgttcttaaattcagtcatttgatattctgtgagacttcatatttctcatccctttattgctttttagcaaacataagaaaccatgagtcattttgtcatttagagtattctgataaaatctcttgaaaatactgaaatcaaaaggttaatgattttttgttcattctgatttgtcattttattatctgttatcggtctaaagtgctaatttacccatttgatttttctgctagacagataacttttaatttttcaaatttggcagacacttttttttttttttgaaaatctttccttccagatctgttgcccactgaacagccacccgtccctcactgtcctggtgtccgattgggctggatggtgttggggcatgatgtgtggaggaactggaaggtgctttaggtctggttcagggtcgggcattctttgttgtttgcacatctttttaaattttacaccttttcttaagaattctaatgccgtcttaagtttttataccaataatgctgagctttaagtgtaggatctggtagtacagacagtgtgatggatgatgctgctggttgtaaatttcatcgtgtgtgtctaattttttttcctgttgaatgggtaaaaacaaaacaaaactttttttagaagatgaatttgctgtcatgttttgtggaatgagggaccgttgagctcactaccacctggagtttgagttgaagcatgaaaatggtgcccatgcctgacgctccagcgcctggatctgcacgtgcccttgtagaggatccttaccgtcctagagagcagacgctttctgaaaactacttgctccaaaagaccctctgagttaacgtttcagctgtatcattagacttgtatttagagcgtgtcacttcctctgaactgttactgcctgaatggagtcctggacgacattgggtttttcctctaggagaatacaagccttaataaacaatactatttagcaaaaaaaaaaaaaaaa

SEQ ID NO: 122 - DNA, 3683 bp, Homo sapiens
aaggccgaaagtcttcggagcttgcgccagtctcttcgcggcgtccaccacttagacgcaagttgctgaagccggccggggagaaggtgttgttgccggagctgagaccgggcggccacagtccgcagggatgaacctcgagttgctggagtcctttgggcagaactatccagaggaagctgatggaactttggattgtatcagcatggctttgacttgcacctttaacaggtggggcacactgcttgcagttggctgtaatgatggccgaattgtcatctgggatttcttgacaagaggcattgctaaaataattagtgcacacatccatccagtgtgttctttatgctggagccgagatggtcataaactcgtgagtgcttccactgataacatagtgtcacagtgggatgttctttcaggcgactgtgaccagaggtttcgattcccttcacccatcttaaaagtccaatatcatccacgagatcagaacaaggttctcgtgtgtcccatgaaatctgctcctgtcatgttgaccctttcagattccaaacatgttgttctgccggtggacgatgactccgatttgaacgttgtggcatcttttgataggcgaggggaatatatttatacgggaaacgcaaaaggcaagattttggtcctaaaaacagattctcaggatcttgttgcttccttcagagtgacaactggaacaagcaataccacagccattaagtcaattgagtttgcccggaaggggagttgctttttaattaacacggcagatcgaataatcagagtttatgatggcagagaaatcttaacatgtggaagagatggagagcctgaacctatgcagaaattgcaggatttggtgaataggaccccatggaagaaatgttgtttctctggggatggggaatacatcgtggcaggttctgcccggcagcatgccctgtacatctgggagaagagcattggcaacctggtgaagattctccatgggacgagaggagaactcctcttggatgtagcttggcatcctgttcgacccatcatagcatccatttccagtggagtggtatctatctgggcacagaatcaagtagaaaactggagtgcatttgcaccagacttcaaagaattggatgaaaatgtagaatacgaagaaagggaatcagagtttgatattgaagatgaagataagagtgagcctgagcagacaggggctgatgctgcagaagatgaggaagtggatgtcaccagcgtggaccctattgctgccttctgtagcagtgatgaagagctggaagattcaaaggctctattgtatttacccattgcccctgaggtagaagacccagaagaaaatccttacggccccccaccggatgcagtccaaacctccttgatggatgaaggggctagttcagagaagaagaggcagtcctcagcagatgggtcccagccacctaagaagaaacccaaaacaaccaatatagaacttcaaggagtaccaaatgatgaagtccatccactactgggtgtgaagggggatggcaaatccaagaagaagcaagcaggccggcctaaaggatcaaaaggtaaagagaaagattctccatttaaaccgaaactctacaaaggggacagaggtttacctctggaaggatcagcgaagggtaaagtgcaggcggaactcagccagcccttgacagcaggaggagcaatctcagaactgttatgaagaccttcgaagttcttcattctttctcactttgccatcatgtggcctctggacactgtggtcagtcatttgaaaattgactttaatttaaaacaaaggcctgtgcctcccacccaggaggtgggagggtgaattttatgtttaaatgaagaagtgaattatggaagaagagtatacgaccttcccttccctttcaagcataagtccaaatagactctcaggaatgaagatttgtgaagacatcagataggaattttgactcatttaaactttgatgcttagttatgttgctggagaaaagatacttatgttttgctcatctaacttcattgtacccagcgtcattttgacatgtcatttcctatctcccatttgccttcggtcctcaatgcatgtctttgagtgacttcttatctgaaattttgctactggtatcctaggaaagcttttgttggatactctcattttaaacttctcctctccccagatacctcctatatttccatattgtgtgcaaaggatgggcagaaaagaaagtgcttgaaagatttcaaattttcagaaagggaacaacgaaggccctctcttcctctcataccacgttttgctcaagaagctgggctgtaacaattcagggttttcccttgttttcctctcattgcatgtttccctccaatattggttcattgtcatcaatcatggtttttgaagatagctagttttatccatctccagcaaagaatcatcaatagtttatattgctttacctgtgctggcttccagagatggaaacaaacccaggtgtctctcaacaagctacttttttactggggtgggggaatctatgcaaggagtaaagtaaaaccatccagaatcaaagcagcaaccacatagttcaaatcaaagatcaaggtgaattttttgtatcactgcctgtggaaatctatcctcatcagtcattgcatttttccctgcctatacctgtgctcctttttcttactgtgttttcagtcacttcctttctgtgaaaggttgcttagctttttttttgacatttgttgttctttataaaaataacagattggatagatgtgtacatttggtgtttgaaattctctgaaaatcccattaggaaaccaggtgtgaaaagggctcagtagcttctctgagtggcgtttttagctgactggaagtgcttaatctggatcgtcttttttttttttttttttttttcaatattttaaaaggagaatttaaatactgtgcttactgtgaaatatatcagttggtgagccgggcgtggtgggtcacgcctgtaatcccagcactttgggaggccaaggcgggttgatcacccgaggtcaggagttcaagaccagcctggccaacgtggtgaaagcctgtatctattaaaagacaaaaattagctgggcgtggtagtacatgcctgtaatcccagctacactggaggctgagtcaggagaatcacttgaacgtgggaggcagaggttgcagtgagtggagatcgcaccactgccctccagcctaggtgacagaatgagactctatctcaaaaaaaaaaaaaaaatgatatcagttggtggatgctcctataggtagccaaacacattgattacctgttagattttaggatagaaatcaaagtagagcacgtcagcaagagcctctttgtctcactccatcatttaaaaccagtatattcagtagttgaagaaagagctctccctgagtcagttgcaaaacgtctatatttttagatgccactacttttttcttaaatattcattttgagactgtcatgagttagaccagtggttgagattagtagatggctcactagacatgtttttgttttgcagacattatatccattccagtcctctgcactgtacactgcagcagtgtgcaaactatg

SEQ ID NO: 123 - DNA, 2591 bp, Homo sapiens
gtcgtggaagcaggactgcgccgcgtcttcctcaaggtggggttcggggggccaccgaatcgctgtcacgccggcaggttgagaacaaaaacatgcacctggagtttccccggagccctctgcgtggttgagcttcggtggaatttcggggctcttggctgccagccgcgcttgcctggtagcaacagaaaccagtcctgctctcctccgtggacatttcattaccatccagaagtgtctcccactgaaggcatccgtggttgtttttaagccacaaaaaagccacacccaagatcacctgacacccaccctgacaagtgtccatgatgctgggccctgagggaggtgaaggctttgtggtcaagctccgtggcctgccctggtcctgctctgttgaggacgtgcagaacttcctctctgactgcacgattcatgatggggccgcaggtgtccatttcatctacactagagagggcaggcagagtggtgaggcttttgttgaacttggatcagaagatgatgtaaaaatggccctgaaaaaagacagggaaagcatgggacaccggtacattgaggtgttcaagtcccacagaaccgagatggattgggtgttgaagcacagtggtcccaacagtgccgacagcgccaacgatggcttcgtgcggcttcgaggactcccatttggatgcacaaaggaagaaattgttcagttcttctcagggttggaaattgtgccaaacgggatcacattgcctgtggaccccgaaggcaagattacaggggaagcgttcgtgcagtttgcctcgcaggagttagctgagaaggctctagggaaacacaaggagaggatagggcacaggtacattgaggtgtttaagagcagccaggaggaagttaggtcatactcagatccccctctgaagttcatgtccgtgcagcggccagggccctatgaccggcccgggactgccaggaggtacattggcatcgtgaagcaggcaggcctggaaaggatgaggcctggtgcctacagcacaggctacgggggctacgaggagtacagtggcctcagtgatggctacggcttcaccaccgacctgttcgggagagacctcagctactgtctctccgggatgtatgaccacagatacggcgacagtgagttcacagtgcagagcaccacaggccactgtgtccacatgaggggcctgccgtacaaagcgaccgagaacgacatttacaacttcttctctcctctcaaccctgtgagagtccatattgagattggcccagatggaagagtgacgggtgaagcagatgttgagtttgctactcatgaagaagctgtggcagctatgtccaaagacagggccaatatgcagcacagatatatagaactcttcttgaattcaacaacaggggccagcaatggggcgtatagcagccaggtgatgcaaggcatgggggtgtctgctgcccaggccacttacagtggcctggagagccagtcagtgagtggctgttacggggccggctacagtgggcagaacagcatgggtggctatgactagttttgttaggaacatttgagttacttcaatcattttcacaggcagccaacaagcaattaagagcagttataatagaggaagctgggggacccattttgcaccatgagtttgtgaaaaatctggattaaaaaattacctcttcagtgttttctcatgcaaaattttcttctagcatgtgataatgagtaaactaaaactattttcagcttttctcaattaacattttggtagtatacttcagagtgatgttatctaagtttaagtagtttaagtatgttaaatgtggatcttttacaccacatcacagtgaacacactggggagacgtgcttttttggaaaactcaaaggtgctagctccctgattcaaagaaatatttctcatgtttgttcattctagtttatattttcatttaaaatcctttaggttaagtttaagctttttaaaagttagttttgagaattgagacacaatactaatactgtaggaattggtgaggccttgacttaaaactttctttgtactgtgatttccttttgggtgtattttgctaagtgaaacttgttaaattttttgttaactaaatttttttcttaaaataaagactttttcacaatgactggcacagattactcagcaaaagatagcaaaacgggtggttgaagataattcattttaatcgtaatgtattttagtgtgaatttaaaaatttcatacatcaaatctatgatctcccttatattcttatgatgaggctaaataaaagtctaataaaaatgttaaatatgtgaatggtggaaatggtgactagcagcacacattctgggaagcatcaaatagacacacggccccagccacctgcaacttatgtgcactgttgtaaaccattcagaattttcctgctaggcccttgatgctggagtcacatctgttgatagctggagaactttagtttcaagtactacattgtgaaagcaattattttgtttctcgtttttataaaatgctgacttaaactttt

SEQ ID NO: 124 - DNA, 3108 bp, Homo sapiens
gcctctggctcctcagggcattcccggcggctccgggtttggcaacgaggacgggggagtgcgactgcgtctcgggcagcatggccgagaagcggcacacacgggactccgaagcccagcggctccccgactccttcaaggacagccccagtaagggccttggaccttgcggatggattttggtggcgttctcattcttattcaccgttataactttcccaatctcaatatggatgtgcataaagattataaaagagtatgaaagagccatcatctttagattgggtcgcattttacaaggaggagccaaaggacctggtttgttttttattctgccatgcactgacagcttcatcaaagtggacatgagaactatttcatttgatattcctcctcaggagatcctcacaaaggattcagtgacaattagcgtggatggtgtggtctattaccgcgttcagaatgcaaccctggctgtggcaaatatcaccaacgctgactcagcaacccgtcttttggcacaaactactctgaggaatgttctgggcaccaagaatctttctcagatcctctctgacagagaagaaattgcacacaacatgcagtctactctggatgatgccactgatgcctggggaataaaggtggagcgtgtggaaattaaggatgtgaaactacctgtgcagctccagagagctatggctgcagaagcagaagcgtcccgcgaggcccgcgccaaggttattgcagccgaaggagaaatgaatgcatccagggctctgaaagaagcctccatggtcatcactgaatctcctgcagcccttcagctccgatacctgcagacactgaccaccattgctgctgagaaaaactcaacaattgtcttccctctgcccatagatatgctgcaaggaatcataggggcaaaacacagccatctaggctagtgtagagatgagcgctagccttccaagcatgaagtcggggaccaaattagcctttaactcataaagagagggtagggcttttctttttccatatgtcaattgtggtgttcccagaatgtatagcagttataaaaataggtgaaagaattgttagcttgtaaatactgagagattggtgatttatataaggtaatctgttagtcttaaaatagttaaaagtttgtatttttagattattatgtagtaggttagatccctcttgttttgacttccactgactcattctgaaccccctaagcacccaggccagaggcaagaacctgggctgtaactgccacctgacaccgctgactggctaaatgctttgcagaaagtgatgaccttacaccacaaccagcttctccaggtcatatgtgccttacctccagagagtctttttttttttttttctgagatggagtttcactcttgttgcccaggctggagtgcaatagcatgatctcggctcactgcaacctccgcctcctgggttcaagagattctcctgcctcagcctccccagtagctgggattacaggctcatgccaccatgcccagctaatttttgtattattattattgttttttagtagagacggggtttcaccatgttggccaggctagtcacgaactcctaacctcaggtgatccacccacctctgcctcccaaagtgctgggattacaggcatgagctaccacacctggtttggagagtcttaattaaggaaatttccctaatgttcatttattttctaaatccagaccgtgtttcagaataatccttacttgagagtagccattttcttgcctgtacttgtcagaactagaggaaatagccaagactaatgaaaaagattactctaacccttaaaagacttttaaattcactactagagtggtcattttaaaaatacatccatgttttaacttatttgagccttctttatgagtaaatgattcctccttgttctgtctttcaaaccagctaaatatttgtcacaaaagtgcttttttctcactgttgcctattttcatatatcaggttttaaatagttttaattttttaataaaattttctctacgttctatatgcaattgttatatatctatttgaatagctgaaggactaaaatacttttttaagagataacttcaggaaaccattatattttactatctgcatgctgttaactgtggtacactgtgaaatatgttgattacaaacccattcattacatagtataaggaattcacagtatattgactatatagtgtctaatgatcttgggcagatactgtcaaacttacaatatctatatagatgtaggtctttttaaatttacctagtcattcttctatcatgtatattgatgctgaaagaggaactggtcagctcctctggacaacaaattcttagtctataatattaggagacatcttctgttttgcaaatgtctgtgaatctgagcaacctggcattctgcttactggccagaaagctggcgggtgacatttgtaacatttcctctttgagactctgagttcacctagagaagtctaagcataacagctttctttcccagcacgagcctttatagctctctttagctcaaccactctgtccatccagccaatggatgtcccttcccctgtaccccaatttcaagcttattttaggaagccttgaactaccatgtatcctggctcctagctgagtttattagaggtatggagcagtgcaacttaaactcaagttgcacttacattttgaattttaaaatgatggttttatctgttgtgtgaagtggttcacccttgaggaccaggagcctccatatcctgactgaaaaccttttctgagacttagagtaacagtgcttttggttccttgagttctcctgtctccagataccaaatgaccttgacttttctgccttgtgaattcgtagtccaatcagctgaaattaaatcacttgggagggacgcatagaaggagctctaggaacacagtgccagtgcagaagtttctccaggtggcctccctttccaacaatgtacataataaagtgtatgcactttcactaataaaaaaaaaaaaaaaaaaaaaaaaaaaaaaaaaaa

SEQ ID NO: 125 - DNA, 5250 bp, Homo sapiens
atggcggacgaggaggctggaggtactgagaggatggaaatcagcgcggagttaccccagacccctcagcgtctggcatcttggtgggatcagcaagttgatttttatactgctttcttgcatcatttggcacaattggtgccagaaatttactttgctgaaatggacccagacttggaaaagcaggaggaaagtgtacaaatgtcaatattcactccactggaatggtacttatttggagaagatccagatatttgcttagagaaattgaagcacagtggagcatttcagctttgtgggagggttttcaaaagtggagagacaacctattcttgcagggattgtgcaattgatccaacatgtgtactctgtatggactgcttccaggacagtgttcataaaaatcatcgttacaagatgcatacttctactggaggagggttctgtgactgtggagacacagaggcatggaaaactggccctttttgtgtaaatcatgaacctggaagagcaggtactataaaagagaattcacgctgtccgttgaatgaagaggtaattgtccaagccaggaaaatatttccttcagtgataaaatatgtcgtagaaatgactatatgggaagaggaaaaagaactgcctcctgaactccagataagggagaaaaatgaaagatactattgtgtccttttcaatgatgaacaccattcatatgaccacgtcatatacagcctacaaagagctcttgactgtgagctcgcagaggcccagttgcataccactgccattgacaaagagggtcgtcgggctgttaaagcgggagcttatgctgcttgccaggaagcaaaggaagatataaagagtcattcagaaaatgtctctcaacatccacttcatgtagaagtattacactcagagattatggctcatcagaaatttgctttgcgtcttggttcctggatgaacaaaattatgagctattcaagtgactttaggcagatcttttgccaagcatgccttagagaagaacctgactcggagaatccctgtctcataagcaggttaatgctttgggatgcaaagctttataaaggtgcccgtaagatccttcatgaattgatcttcagcagtttttttatggagatggaatacaaaaaactctttgctatggaatttgtgaagtattataaacaactgcagaaagaatatatcagtgatgatcatgacagaagtatctctataactgcactttcagttcagatgtttactgttcctactctggctcgacatcttattgaagagcagaatgttatctctgtcattactgaaactctgctagaagttttacctgagtacttggacaggaacaataaattcaacttccagggttatagccaggacaaattgggaagagtatatgcagtaatatgtgacctaaagtatatcctgatcagcaaacccacaatatggacagaaagattaagaatgcagttccttgaaggttttcgatcttttttgaagattcttacctgtatgcagggaatggaagaaatccgaagacaggttgggcaacacattgaagtggatcctgattgggaggctgccattgctatacagatgcaattgaagaatattttactcatgttccaagagtggtgtgcttgtgatgaagaactcttacttgtggcttataaagaatgtcacaaagctgtgatgaggtgcagtaccagtttcatatctagtagcaagacagtagtacaatcgtgtggacatagtttggaaacaaagtcctacagagtatctgaggatcttgtaagcatacatctgccactctctaggacccttgctggtcttcatgtacgtttaagcaggctgggtgctgtttcaagactgcatgaatttgtgtcttttgaggactttcaagtagaggtactagtggaatatcctttacgttgtctggtgttggttgcccaggttgttgctgagatgtggcgaagaaatggactgtctcttattagccaggtgttttattaccaagatgttaagtgcagagaagaaatgtatgataaagatatcatcatgcttcagattggtgcatctttaatggatcccaataagttcttgttactggtacttcagaggtatgaacttgccgaggcttttaacaagaccatatctacaaaagaccaggatttgattaaacaatataatacactaatagaagaaatgcttcaggtcctcatctatattgtgggtgagcgttatgtacctggagtgggaaatgtgaccaaagaagaggtcacaatgagagaaatcattcacttgctttgcattgaacccatgccacacagtgccattgccaaaaatttacctgagaatgaaaataatgaaactggcttagagaatgtcataaacaaagtggccacatttaagaaaccaggtgtatcaggccatggagtttatgaactaaaagatgaatcactgaaagacttcaatatgtacttttatcattactccaaaacccagcatagcaaggctgaacatatgcagaagaaaaggagaaaacaagaaaacaaagatgaagcattgccgccaccaccacctcctgaattctgccctgctttcagcaaagtgattaaccttctcaactgtgatatcatgatgtacattctcaggaccgtatttgagcgggcaatagacacagattctaacttgtggaccgaagggatgctccaaatggcttttcatattctggcattgggtttactagaagagaagcaacagcttcaaaaagctcctgaagaagaagtaacatttgacttttatcataaggcttcaagattgggaagttcagccatgaatatacaaatgcttttggaaaaactcaaaggaattccccagttagaaggccagaaggacatgataacgtggatacttcagatgtttgacacagtgaagcgattaagagaaaaatcttgtttaattgtagcaaccacatcaggatcggaatctattaagaatgatgagattactcatgataaagaaaaagcagaacgaaaaagaaaagctgaagctgctaggctacatcgccagaagatcatggctcagatgtctgccttacagaaaaacttcattgaaactcataaactcatgtatgacaatacatcagaaatgcctgggaaagaagattccattatggaggaagagagcaccccagcagtcagtgactactctagaattgctttgggtcctaaacggggtccatctgttactgaaaaggaggtgctgacgtgcatcctttgccaagaagaacaggaggtgaaaatagaaaataatgccatggtattatcggcctgtgtccagaaatctactgccttaacccagcacaggggaaaacccatagaactctcaggagaagccctagacccacttttcatggatccagacttggcatatggaacttatacaggaagctgtggtcatgtaatgcacgcagtgtgctggcagaagtattttgaagctgtacagctgagctctcagcagcgcattcatgttgacctttttgacttggaaagtggagaatatctttgccctctttgcaaatctctgtgcaatactgtgatccccattattcctttgcaacctcaaaagataaacagtgagaatgcagatgctcttgctcaacttttgaccctggcacggtggatacagactgttctggccagaatatcaggttataatataagacatgctaaaggagaaaacccaattcctattttctttaatcaaggaatgggagattctactttggagttccattccatcctgagttttggcgttgagtcttcgattaaatattcaaatagcatcaaggaaatggttattctctttgccacaacaatttatagaattggattgaaagtgccacctgatgaaagggatcctcgagtccccatgctgacctggagcacctgcgctttcactatccaggcaattgaaaatctattgggagatgaaggaaaacctctgtttggagcacttcaaaataggcagcataatggtctgaaagcattaatgcagtttgcagttgcacagaggattacctgtcctcaggtcctgatacagaaacatctggttcgtcttctatcagttgttcttcctaacataaaatcagaagatacaccatgccttctgtctatagatctgtttcatgttttggtgggtgctgtgttagcattcccatccttgtattgggatgaccctgttgatctgcagccttcttcagttagttcttcctataaccacctttatctcttccatttgatcaccatggcacacatgcttcagatactacttacagtagacacaggcctaccccttgctcaggttcaagaagacagtgaagaggctcattccgcatcttctttctttgcagaaatttctcaatatacaagtggctccattgggtgtgatattcctggctggtatttgtgggtctcactgaagaatggcatcaccccttatcttcgctgtgctgcattgtttttccactatttacttggggtaactccgcctgaggaactgcataccaattctgcagaaggagagtacagtgcactctgtagctatctatctttacctacaaatttgttcctgctcttccaggaatattgggatactgtaaggcccttgctccagaggtggtgtgcagatcctgccttactaaactgtttgaagcaaaaaaacaccgtggtcaggtaccctagaaaaagaaatagtttgatagagcttcctgatgactatagctgcctcctgaatcaagcttctcatttcaggtgcccacggtctgcagatgatgagcgaaagcatcctgtcctctgccttttctgtggggctatactatgttctcagaacatttgctgccaggaaattgtgaacggggaagaggttggagcttgcatttttcacgcacttcactgtggagccggagtctgcattttcctaaaaatcagagaatgccgagtggtcctggttgaaggtaaagccagaggctgtgcctatccagctccttacttggatgaatatggagaaacagaccctggcctgaagaggggcaacccccttcatttatctcgtgagcggtatcggaagctccatttggtctggcaacaacactgcattatagaagagattgctaggagccaagagactaatcagatgttatttggattcaactggcagttactgtga

SEQ ID NO: 126 - DNA, 2732 bp, Homo sapiens
cccgcctcctggtaggagggggtttccgcttccggcagcagcggctgcagcctcgctctggtccctgcggctggcggccgagccgtgtgtctcctcctccatcgccgccatattgtctgtgtgagcagaggggagagcggccgccgccgctgccgcttccaccacagtttgaagaaaacaggtctgaaacaaggtcttacccccagctgcttctgaacacagtgactgccagatctccaaacatcaagtccagctttgtccgccaacctgtctgacatgtcgggacccgtgccaagcagggccagagtttacacagatgttaatacacacagacctcgagaatactgggattacgagtcacatgtggtggaatggggaaatcaagatgactaccagctggttcgaaaattaggccgaggtaaatacagtgaagtatttgaagccatcaacatcacaaataatgaaaaagttgttgttaaaattctcaagccagtaaaaaagaagaaaattaagcgtgaaataaagattttggagaatttgagaggaggtcccaacatcatcacactggcagacattgtaaaagaccctgtgtcacgaacccccgccttggtttttgaacacgtaaacaacacagacttcaagcaattgtaccagacgttaacagactatgatattcgattttacatgtatgagattctgaaggccctggattattgtcacagcatgggaattatgcacagagatgtcaagccccataatgtcatgattgatcatgagcacagaaagctacgactaatagactggggtttggctgagttttatcatcctggccaagaatataatgtccgagttgcttcccgatacttcaaaggtcctgagctacttgtagactatcagatgtacgattatagtttggatatgtggagtttgggttgtatgctggcaagtatgatctttcggaaggagccatttttccatggacatgacaattatgatcagttggtgaggatagccaaggttctggggacagaagatttatatgactatattgacaaatacaacattgaattagatccacgtttcaatgatatcttgggcagacactctcgaaagcgatgggaacgctttgtccacagtgaaaatcagcaccttgtcagccctgaggccttggatttcctggacaaactgctgcgatatgaccaccagtcacggcttactgcaagagaggcaatggagcacccctatttctacactgttgtgaaggaccaggctcgaatgggttcatctagcatgccagggggcagtacgcccgtcagcagcgccaatatgatgtcagggatttcttcagtgccaaccccttcaccccttggacctctggcaggctcaccagtgattgctgctgccaacccccttgggatgcctgttccagctgccgctggcgctcagcagtaacggccctatctgtctcctgatgcctgagcagaggtgggggagtccaccctctccttgatgcagcttgcgcctggcggggaggggtgaaacacttcagaagcaccgtgtctgaaccgttgcttgtggatttatagtagttcagtcataaaaaaaaaattataataggctgattttcttttttctttttttttttaactcgaacttttcataactcaggggattccctgaaaaattacctgcaggtggaatatttcatggacaaatttttttttctcccctcccaaatttagttcctcatcacaaaagaacaaagataaaccagcctcaatcccggctgctgcatttaggtggagacttcttcccattcccaccattgttcctccaccgtcccacactttagggggttggtatctcgtgctcttctccagagattacaaaaatgtagcttctcaggggaggcaggaagaaaggaaggaaggaaagaaggaagggaggacccaatctataggagcagtggactgcttgctggtcgcttacatcactttactccataagcgcttcagtggggttatcctagtggctcttgtggaagtgtgtcttagttacatcaagatgttgaaaatctacccaaaatgcagacagatactaaaaacttctgttcagtaagaatcatgtcttactgatctaaccctaaatccaactcatttatacttttatttttagttcagtttaaaatgttgataccttccctcccaggctccttaccttggtcttttccctgttcatctcccaacatgctgtgctccatagctggtaggagagggaaggcaaaatctttcttagttttctttgtcttggccattttgaattcatttagttactgggcataacttactgctttttacaaaagaaacaaacattgtctgtacaggtttcatgctagagctaatgggagatgtggccacactgacttccattttaagctttctaccttcttttcctccgaccgtccccttccctcacatgccatccagtgagaagacctgctcctcagtcttgtaaatgtatcttgagaggtaggagcagagccactatctccattgaagctgaaatggtagacctgtaattgtgggaaaactataaactctcttgttacagccccgccaccccttgctgtgtgtatatatataatactttgtccttcatatgtgaaagatccagtgttggaattctttggtgtaaataaacgtttggttttatttatcaaaaaaaaaaaaaaa

SEQ ID NO: 127 - DNA, 1128 bp, Homo sapiens
gcttctcgttgtgccccgcccgcaagcgccctcctccgggccttcgtgacagccaggtcgtgcgcgggtcatcctgggattggtagttcgctttctctcatttagccagtttctttctctaccggggactccgtgtcccggcatccaccgcggcacctgacccttggcgcttgcgtgttgccctcttccccaccctccctaatttccactccccccaccccacttcgcctgccgcggtcgggtccgcggcctgcgctgtagcggtcgccgccgttccctggaagtagcaacttccctaccccaccccagtcctggtccccgtccagccgctgacgtgaagatgagcagctcagaggaggtgtcctggatttcctggttctgtgggctccgtggcaatgaattcttctgtgaagtggatgaagactacatccaggacaaatttaatcttactggactcaatgagcaggtccctcactaccgacaagctctagacatgatcttggacctggagcctgatgaagaactggaagacaaccccaaccagagtgacctgattgagcaggcagccgagatgctttatggattgatccacgcccgctacatccttaccaaccgtggcatcgcccagatgttggaaaagtaccagcaaggagactttggttactgtcctcgtgtgtactgtgagaaccagccaatgcttcccattggcctttcagacatcccaggtgaagccatggtgaagctctactgccccaagtgcatggatgtgtacacacccaagtcatcaagacaccatcacacggatggcgcctacttcggcactggtttccctcacatgctcttcatggtgcatcccgagtaccggcccaagagacctgccaaccagtttgtgcccaggctctacggtttcaagatccatccgatggcctaccagctgcagctccaagccgccagcaacttcaagagcccagtcaagacgattcgctgattccctcccccacctgtcctgcagtctttgacttttcctttcttttttgccaccctttcaggaaccctgtatggtttttagtttaaattaaaggagtcgttattgtggtgggaatatgaaataaagtagaagaaaaggcc

SEQ ID NO: 128 - DNA, 2368 bp, Homo sapiens
cgggcgatgccgcgctgcgggggggccgcacagccgccgccaccgccaccgccgccgggtggggtgggaggggcgggaacgcgcgccgccgcctccagggtgggcgcctttcgccgtggacgccgaccgtccgggacgagggtttcatcaccttaaatggttttgaaccaatgaaggtgtattcccttaaaaagacggacagcccatcgtgtgaactatagagtttgtggacagatttatattgggttcatagtggcgtcatgcacgcagactcctgcaagttcccctaagttcttagaggactgctttgccttttgatctgagagttgcaaagttccataaagaatggcccttgtggataagcacaaagtcaagagacagcgattggacagaatttgtgaaggtatccgcccccagatcatgaacggccccctgcacccccgccccctggtggcgctgctggacggccgcgactgcactgtggagatgcccatcctgaaggacctggccactgtggccttctgtgacgcgcagtcgacgcaggaaatccacgagaaggttctaaacgaagccgtgggcgccatgatgtaccacaccatcaccctcaccagggaggacctggagaagttcaaggccctgagagtgatcgtgcggataggcagtggctatgacaacgtggacatcaaggctgccggcgagctcggaattgccgtgtgcaacatcccgtctgcagccgtggaagagacagcggactctaccatctgccacatcctcaacctgtaccggaggaacacgtggctgtaccaggcactgcgggaaggcacgcgggttcagagcgtggagcagatccgcgaggtggcctcgggagcggcccgcatccgtggggagacgctgggcctcattggctttggtcgcacggggcaggcggttgcagttcgagccaaggcctttggattcagcgtcatattttatgacccctacttgcaggatgggatcgagcggtccctgggcgtgcagagggtctacaccctgcaggatttgctgtatcagagcgactgcgtctccttgcactgcaatctcaacgaacataaccaccacctcatcaatgactttaccataaagcagatgaggcagggagcattccttgtgaacgcagcccgtggcggcctggtggacgagaaagccttagcacaagccctcaaggagggcaggatacgaggggcagccctcgacgtgcatgagtcagagcccttcagctttgctcagggtccgttgaaagatgccccgaatctcatctgcactcctcacactgcctggtacagtgagcaggcgtcactggagatgagggaggcagctgccaccgagatccgccgagccatcacaggtcgcatcccagaaagcttaagaaattgtgtgaacaaggaattctttgtcacatcagcgccttggtcagtaatagaccagcaagcaattcatcctgagctcaatggtgccacatacagatatccgccaggcatcgtgggtgtggctccaggaggacttcctgcagccatggaagggatcatccctggaggcatcccagtgactcacaacctcccgacagtggcacatccttcccaagcgccctctcccaaccagcccacaaaacacggggacaatcgagagcaccccaacgagcaatagcagagaatgccagaaggtaatcactcagatacacttgggaccaagagacagtgaaaaatagatgaactaagagaaaaagaatcggatggtctttgtaactgattctggacatatgcatcattgatgttgcagtgttgaaactacaagagctagaaaactgaagatgtcgtctgcttacggaagcgctgaaagactaggatgtgatttattaacgaccaacttctgttattgtgtgttaagtttttcatctgtgcatcaaatcacaaaaagaataaatagagctttttcctttatcagtcccttgggcacagcaggtcctgaacaccctgctctacaatgttgcatcaagagttcaaacaacaaaataaaaaatattaagaggaaatccccatcctgtgacttgagtcccttaagtctacaggggctggtgacctctttttgctaataggaaaatcacattactacaaaatggggagaaaactgtttgcctgtggtagacacctgcacgcataggattgaagacagtacaggctgctgtacagagaagcgcctctcacatctgaactgcatactgagcgggcaagtcggttgtaagttcagtaaaaccctctgatgatgcaaaaaaaaaaaaaaagtattaagtttcacaagctgtttgtactcaaatatattttctcagtttcag

SEQ ID NO: 129 - DNA, 6628 bp, Homo sapiens
tcaccatccccaaccccaccggcagcgacgccggctactacgagtgcgaggctgtcctgcgcagcagcagcgtcccctctgttgtccggggcgcctacctctcagtgctggaaccgcctcagtttgtcaaggagccagaaagacacatcactgcggagatggagaaggtggtggacatcccctgtcaggccaaaggtgtgccgccgccctccatcacctggtacaaggacgcagccgtggtggaggtggagaagttgacccgcttccggcagcgcaacgacgggggcctgcagatcagcggcctggtgcccgatgataccggcatgttccagtgcttcgcccgcaatgcagccggcgaggtgcaaacttccacctacctggctgtcaccagcatcgcccctaacatcaccagaggccccctggacagcacggtgatcgatggcatgtcagtggtgctagcatgtgagacctcgggggcgccccgaccagctatcacttggcagaaaggggagcgcatcttggccagtggctctgtgcagctgcctcgcttcacacccctggagtcgggcagcctcctcatcagccccacacacatctccgatgcggggacctacacctgcctggccaccaactctcggggggtcgatgaggcctcagcagacctagtcgtttgggctcggacccgcatcaccaagcccccccaggatcagagtgtcatcaagggcacccaggcctccatggtgtgcggagtgacccacgacccccgagtaaccatcaggtacatctgggagaaggacggggccaccctgggcacggagagccatcctcgtatccgcctggacagaaacggctccctgcacatctcacagacgtggtcgggagacatcggcacgtacacctgccgggtgatctcagcaggaggcaacgactctcgcagtgcccacctgcgagtcaggcaactgccccacgcgcccgagcacccagtggccactctcagcaccgtggaaaggcgagccatcaacctgacgtggaccaagccctttgatggcaacagccccctgatccgctacattctggagatgtcggagaacaatgccccctggactgtactcctggccagtgtggaccccaaagctacctcagtgacagtcaagggcctggttcctgcacgctcctaccagttccgtctttgtgccgtcaacgacgtggggaaaggacagttcagcaaagacaccgagagggtctccctccccgaggagccccccacggcccctccacagaacgtcatcgccagcggtcgaaccaaccagtccatcatgatccagtggcagccgcctcctgagagccaccagaatggaattctcaagggttacatcatcaggtactgcctggccgggctgcccgtggggtaccagtttaagaacatcacggatgctgatgtgaacaacctgctgctggaggatctcatcatttggaccaactacgagatcgaggtggctgcttacaacagcgctgggctgggggtctacagcagtaaagtcaccgagtggacgctgcagggagttcccacagtccctccgggcaatgtgcacgcggaagccaccaattccacgaccatccgcttcacctggaacgcccccagcccccagttcatcaacggcatcaaccagggctacaagctgatcgcctgggagccggaacaggaagaggaggttaccatggtgaccgcccggcctaactttcaagacagcatccacgtgggcttcgtgtctggcctgaagaagttcaccgagtacttcacctcagtgctgtgtttcaccacccccggggacgggccacgcagcaccccgcagctggtgcgcacccatgaggatgtgcctgggcccgtgggacacctgagcttcagtgagatcctggacacatcgctgaaggtcagctggcaagagccgggagagaaaaatggcatcctcacagggtaccggatctcctgggaggagtacaatcgaaccaacacccgtgtgacccactacctgcccaacgtgaccctggagtaccgtgtcacgggcctcaccgcgctcaccacctacaccatcgaggtggccgccatgacctcaaagggccagggccaagtgtccgcctccaccatctcctctggggtgcccccagaactcccagggccccccaccaacctgggcatttccaacatcggcccccgctctgtgaccttgcagttcaggccaggctacgatgggaaaacctccatctcccgctggctggtggaagcccaggtaggcgtggttggggagggagaggagtggttgctgatccaccagctctccaatgagcccgatgcccgctccatggaggtgcccgacctcaaccccttcacctgctacagcttccgcatgcgccaggtgaacatcgtgggcaccagcccccccagtcagccttctagaaagatccagaccctgcaggcaccccctgacatggccccagccaatgtgtctctgcgcacagccagtgagaccagcctgtggctgcgctggatgcctctcccggagatggaatacaatgggaaccctgagtccgtgggctataagatcaagtacagccggtcagacgggcatggcaagacgctgagccacgtggtgcaggaccgtgtggagcgggactacaccatcgaggacctggaggagtggacagagtaccgcgtccaggtccaggccttcaacgccatcgggagcgggccctggagccagacggtggtgggcaggacccgggagtcagttccctcttccggccccaccaatgtgtctgcactggccaccacctccagcagcatgctggtgcgctggagcgaggtccccgaggctgatcgcaacgggctcgtgctgggctataaggtgatgtataaggagaaggactcggacacccagccccgattctggctggtggaaggcaactcgtctcgcagtgcccagctcaccggcttgggcaaatacgtgctctatgaagtccaggtgctggccttcacacgcatcggggacggcagccccagccaccctcccatcctggagcggacgctggatgatgtcccaggaccacccatgggcatcctgttcccagaggtgcggaccacgtctgtgcggctgatctggcagccccctgccgcccccaatggcatcattcttgcttaccagatcacacaccggctcaacaccaccacggccaacaccgccactgtggaggtgctggcacccagcgcccggcagtacacagccacgggcctcaagccagagtctgtctacctgttccgcatcacggcccagacccgcaagggctggggagaagctgccgaggccttggtggtgaccaccgagaagagagaccgtccgcagccccccagcaggccgatggtgcagcaggaggatgtgagagcacgcagcgtgctgctgtcctgggagccagggagcgacgggctctcccctgtgcgctactacaccatccagacccgcgagctgcccagcggcaggtgggcactgcactcggcctccgtgagccacaatgcctccagcttcattgtggacaggctgaagcccttcacgtcctacaagttccgagtgaaggcgaccaatgacattggcgacagcgagttcagcgaggagtcggagtcactgaccaccctgcaggctgcccccgatgaagcacccaccatcctctccgtgacgccccacaccaccacctccgtgctaatccgatggcagccgccagcagaggacaagatcaatggcatcctcctgggcttccggatccgataccgggagctgctctatgaaggactgaggggcttcacgcttcgaggcatcaacaacccaggggccacatgggctgagcttacctccatgtactccatgcggaacctgagccggcccagcctcacgcagtacgagctggacaacctgaacaagcacaggcggtacgagatacggatgagcgtgtacaacgctgtgggtgaggggccctccagccccccgcaggaggtctttgttggggaggcagtgcccacagcagcacctcgtaacgtggtcgtccacggcgccacggccacacagctggacgtgacttgggagccacctccgctggacagccagaatggagacatccaggggtacaagatttatttctgggaagcccagcgggggaacctcacagagcgagtgaagacgcttttcctggctgagaacagcgtgaagctcaagaacttgactggctacacggcctacatggtcagcgtggccgccttcaacgccgctggggatgggcctcggagcacccccacccaaggccagacccagcaagcagcccccagcgctcccagctcggtcaagttcagtgagctgaccacaacctcagtgaatgtgtcctgggaagccccgcagttccccaatggcatcctggagggctacaggctggtgtacgagccctgcagccccgtggatggagtcagcaagatcgtgaccgtggacgtgaaggggaacagccccctgtggctgaaggtgaaggacctggcggagggggtgacctacaggttccgcatcagagccaagaccttcacctacgggccggagatcgaagccaacgtcaccacgggccccggagaaggtgccccaggaccgcctggcgtgcccatcatcgtgcggtacagctctgccatcgccattcactggtccagcggagacccgggcaaagggcccatcacccgctacgtcatcgaggccagaccttcagacgagggactatgggacatcctcatcaaagacatccccaaggaggtgagctcctacacgttcagcatggacatcctgaagccgggcgtgagctatgacttccgggtcatcgcggtcaacgactatggtttcggcacccccagcagcccctcccagtctgtgccagcccagaaagccaaccccttctatgaggagtggtggttcttggtggtcattgccctggtcggcctcatcttcatcctgcttctggtcttcgtgctcatcatccggggccagagcaagaagtacgccaagaagacagactcggggaacagtgccaagtctggagccctaggccacagcgagatgatgagcttggatgaaagcagcttccctgccctggaactcaacaacaggcggctctccgtcaagaactctttctgccgaaagaacggcctgtacaccaggtctccccccaggcccagcccaggcagcctgcactactcggatgaggatgtcaccaaatacaacgacctcatccctgcagagagcagcagcctgacggagaagccctcagaaatctccgactctcagggaagtgacagcgagtacgaggtcgactcaaaccaccagaaggcccactcctttgtcaaccactacatcagtgaccccacatactacaactcgtggcggcgacagcagaagggcatctcgagggcacaggcctacagctacacggagagcgactcgggtgagccagaccacaccaccgtcaccaacagcaccagcacccagcagggcagcctctttcggcccaaggccagtcggactccaacgccccagaacccccctaaccccccaagtcagcagagcaccctctaccgtccccccagcagcctggccccaggctcccgggctcccatagcaggattttcatcatttgtttgacatcagaagaggaaaaagcagaaagagaaatggcaccaaactcctccttcacccctcctctcactgcctgccagaaaacaaaaacaccaagaaaccaagtcaacttttcacctcctgagtttatttttccagagattccagggccagcaaagccggcgttcagaaggagggagaaaaccgtgagaggatgtgtgtggccagcagctcttcagctttgagatggtggggttcactgctcccttgggaattacacggagctggggaagtggctgtgtcactgctatggacacggagtggggcgggcatctggagagagagagggagcggaggctaaggactggaggccgccaggcaggcgtggccgagggaagaaaaagcttctggatgtccagccagctgcccccttccagcccctccaggacccctggacccactgccgctgctctctgcaaaaagaatgggcatcccggaggccacgcctatcttctctctctgctcctccttccctccatgcaccatcactgtggctggcaggcatcggacagcctcatccagaccccctgccctgtcttggcaacctctactgcccatctcccctgctcaacttctccaccaagcatttggtttatttagaaaaaggaagaaaaacaaaaaacaaaaaactaaagggtgagaatttgcttagcgccttccttgttcctgcatattttttaaaatattgaatccaaggaagagagcccaagggtaggggagaaaccccccacaactgacccctgcctccctgtgctggaattgactttcctgagcatggacaaggaaaggtgaagtctggggagcagaggtgtaaataaggcgactggccttggcactgtgggatgattaggtttaacgcattgtgggcaagataagaatga

SEQ ID NO: 130 - DNA, 4696 bp, Homo sapiens
ggcagaccgtcacgtgacgacgtcgattcgcgtgcggcagtggcgaagttgacaaaccccgcgaaaatcgactctttgcatcgcacattttgttgattttccctcgtttttctttctctctttcccccgtccatccgaaagagggttggaaaaaaacaaaacaaacaaacaaacaaaaaaaaaacctaacgctgttgggacccggaagcggaaagggcatctttgaggtcgatacttccgggtcattgggagagtgcgggattcctgggccgagagcgggtggctgagccgggacctcgcgtgattctcggaacccgaggagaagcggcgtccggggctatggctgtgactctggacaaagacgcttattatcggcgagtgaagagactgtacagcaattggcggaaaggagaagatgagtatgccaacgttgatgccattgttgtatcagtgggtgttgatgaagaaattgtttatgccaaatcaactgccttacagacatggctctttggttatgaactaactgatactatcatggtcttttgtgatgacaaaatcatctttatggccagcaagaaaaaagtggagttcttgaaacagattgccaacactaagggcaatgagaatgctaatggagcccctgccatcacactgctaatacgagaaaagaatgaaagtaataagagtagctttgacaaaatgattgaagccattaaagaaagcaagaatggcaagaagattggagtgttcagcaaagacaaattccctggagagttcatgaagagctggaatgactgcctcaacaaagaaggctttgacaaaatagatatcagtgcagttgtggcatataccatcgctgtaaaggaggatggggagctcaacctaatgaagaaagcagccagcatcacttctgaagtcttcaacaaattcttcaaggaaagagtcatggaaatagttgatgcagatgagaaagttcgacacagcaaactggctgagtctgtggaaaaggccattgaagagaaaaaataccttgctggggcagacccttctactgtggaaatgtgttaccctcctatcattcagagtggtggcaactataatctcaagttcagtgtggtgagtgacaagaatcatatgcactttggggctatcacttgtgccatgggtattcgcttcaagtcttactgctccaaccttgttcgcactttgatggttgatccttctcaagaagttcaagaaaattataactttttgctccagcttcaagaggagctgctgaaggaattaagacatggtgtgaagatatgtgacgtgtataacgctgtcatggacgtggttaaaaagcagaagccagaactgctgaacaaaattaccaaaaacctagggtttgggatgggaattgaattccgtgaaggctccctagtaatcaatagcaaaaatcaatacaaactgaagaaaggaatggttttcagcatcaatttaggattctcagacctgactaacaaggaggggaaaaagccagaagagaaaacctatgccctgttcattggtgacacagtgcttgtggatgaggatggcccagctactgttctcacttctgtgaagaagaaagtgaagaatgtggggattttcctaaagaatgaagatgaggaagaagaggaggaggagaaagatgaggcagaggaccttttgggaagaggttctcgggcagcattacttacagaaagaacaagaaatgaaatgactgcagaagagaagcgaagagcacatcagaaagaactagcggctcaactcaatgaagaagcaaagaggcgattgactgaacaaaagggagaacagcagattcagaaagctcgcaagtctaatgtgtcctataaaaacccatctctgatgcctaaggaaccgcatattcgggaaatgaagatctacatcgataagaaatatgagactgtaataatgcccgtgtttggcattgcaacaccgtttcacattgccacaatcaagaatataagtatgtccgtggaaggagattatacttacttgcgaatcaacttttattgcccaggcagtgctctgggcaggaatgaaggcaacatctttcctaaccctgaagcgacttttgtcaaggaaattacataccgagcatcaaatattaaggcacccggagaacagacagtaccagccttgaaccttcagaatgctttccgaattattaaagaagtacagaaacgttataaaactcgagaagctgaagagaaagagaaggaggggattgtaaaacaagactcactggtgatcaatctaaaccggagtaatccgaaactgaaagatctatacattcgcccaaatattgcccaaaagaggatgcaaggctcactggaggcccatgtcaatggcttccgcttcacatctgttcgaggagacaaagtggatattttgtacaataatattaagcatgctttgttccagccctgtgatggagaaatgattattgtcttgcactttcacctcaagaatgccatcatgtttgggaagaagcggcacacggatgtgcagttctacacagaagtgggagagataaccacggacttggggaaacatcagcatatgcatgaccgagatgacctctatgctgagcagatggaacgagaaatgaggcacaaactgaaaacagcctttaaaaatttcattgagaaagtagaggctctaactaaggaggaactggaatttgaagtgccttttagggacttgggatttaacggagctccctataggagtacctgcctccttcagcccactagtagtgcgctggtaaatgctacggaatggccaccttttgtggtgacattggatgaggtagagctgatccactttgagcgggtccagtttcacctgaagaactttgatatggtaatcgtctacaaggactacagcaagaaagtgaccatgatcaacgccattcctgtagcctctcttgaccccatcaaggaatggttgaattcctgcgacctgaaatacacagaaggagtacagtccctcaactggactaaaatcatgaagaccattgttgatgaccctgagggcttcttcgaacaaggtggctggtctttcctggagcctgagggtgaggggagtgatgctgaagaaggggattcagagtctgaaattgaagatgagacttttaatccttcagaagatgactatgaagaggaagaggaggacagtgatgaagattattcatcagaagcagaagagtcagactattctaaggagtcattgggtagtgaagaagagagtggaaaggattgggatgaactggaggaagaagcccgaaaagcggaccgagaaagtcgttacgaggaagaagaagaacaaagtcgaagtatgagccggaagaggaaggcatctgtgcacagttcgggccgtggctctaaccgtggttccagacacagctctgcaccccccaagaaaaagaggaagtaacttctgaactttggccctgagctccattcttcctccagccaacccctgaaaattttacatgacatagaaactgtatttttcctttcgttttcatttgaagttttgccatttgtgtttatgggtttagggggccatttgtgtggaccaatctactcggggaattccaggcccaccaggacacgtgccaatggccccattcagatggcaagggaggaggtgttcttgaagacaggaggaggctcccgctgttaataaatattgtttcattcttctctcttcctgtcaccttctgccaagacattgatggcttctgacatcttatttggtgtctcaaagctgtatttccaagacagtggtacaaggtgacccttaattacccgtatcatggttcttgaccagcacattcaatcctccaacctaccctactgccatgaccttccgcacatctctaagttttatctttgcaatactcaaggttctcggaaatttgctaatggttgtgataaaccatacagcttgagccagtgaggcagattgggctggtgccttcgtctgagttttcctgctttcctgcctcgtgcagattctgaggtatatctgctgccttggaagacataagaagcagtgatactccctggctcggttattttctccatacaatgcacacatggtacaatgatagaaggcaaaattgccactgtcttcttttttttctcatatatctaaggaagatatatcaggttgtgcctcatgtaccgcttctagtgaaatgtagaggaaggctcaaaggagtcaacatttagatctggaagggacaagtcatgccttgggcctagaataccctgatgagaaaagagaagaggaagggaggccatatctacaacacagcctctcggcactgctgctccttattttaactttgtcttgcattgtcctgtatttatcacagtttctgttgaacagcttttcaagtatttggggagtttatcttgccatcctccccttctggttctctgcacccacctgtcccactgcagttccttccgtgctctgtgactttaagagaagaaggggggaggggtcccggattttatgtttgtttgttttttctccttagcagtaggacttgatattttcaattttggaagaactaaaagatgaataaactgggttttttttgttgtttgtttttgtaaaaaaaaaaaaaaaaaaa

SEQ ID NO: 131 - DNA, 1836 bp, Homo sapiens
atggcggcctcagcaaaaaagaagaataagaaggggaagactatctccctaacagactttctggctgaggatgggggtactggtggaggaagcacctatgtttccaaaccagtcagctgggctgatgaaacggatgacctggaaggagatgtttcgaccacttggcacagtaacgatgacgatgtgtatagggcgcctccaattgaccgttccatccttcccactgctccacgggctgctcgggaacccaatatcgaccggagccgtcttcccaaatcgccaccctacactgcttttctaggaaacctaccctatgatgttacagaagagtcaattaaggaattctttcgaggattaaatatcagtgcagtgcgtttaccacgtgaacccagcaatccagagaggttgaaaggttttggttatgctgaatttgaggacctggattccctgctcagtgccctgagtctcaatgaagagtctctaggtaacaggagaattcgagtggacgttgctgatcaagcacaggataaagacagggatgatcgttcttttggccgtgatagaaatcgggattctgacaaaacagatacagactggagggctcgtcctgctacagacagctttgatgactacccacctagaagaggtgatgatagctttggagacaagtatcgagatcgttatgattcagaccggtatcgggatgggtatcgggatgggtatcgggatggcccacgccgggatatggatcgatatggtggccgggatcgctatgatgaccgaggcagcagagactatgatagaggctatgattcccggataggcagtggcagaagagcatttggcagtgggtatcgcagggatgatgactacagaggaggcggggaccgctatgaagaccgatatgacagacgggatgatcggtcgtggagctccagagatgattactctcgggatgattataggcgtgatgatagaggtcccccccaaagacccaaactgaatctaaagcctcggagtactcctgaagaagatgattcctctgctagtacctcccagtccactcgagctgcttctatctttggaggggcaaagcctgttgacacagctgctagagaaagagaagtagaagaacggctacagaaggaacaagagaagttgcagcgtcagtggaatgagccaaaactagaacgacggcctcgggagagacacccaagctggcgaagtgaagaaactcaggaacgggaacggtcgaggacaggaagtgagtcatcacaaactgggacctccaccacatctagcagaaatgcacgaaggagagagagtgagaagtctctagaaaatgaaacactcaataaggaggaagattgccactctccaacttctaaacctcccaaacctgatcagcccctaaaggtaatgccagcccctccaccaaaggagaatgcttgggtgaagcgaagttctaaccctcctgctcgatctcagagctcagacacagagcagcagtcccctacaagtggtgggggaaaagtagctccagctcaaccatctgaggaaggaccaggaaggaaagatgaaaataaagtagatgggatgaatgccccaaaaggccaaactgggaactctagccgtggtccaggagacggagggaacagagaccactggaaggagtcagataggaaagatggcaaaaaggatcaagactccagatctgcacctgagccaaagaaacctgaggaaaatccagcttctaagttcagttctgcaagcaagtatgctgctctctctgttgatggtgaagatgaaaatgagggagaagattatgccgaatag

SEQ ID NO: 132 - DNA, 7861 bp, Homo sapiens
gtttggggcatctccgcggtccggcccggggccccgggatctcggctgtccttcctcccggcataagatgcacatttttctgctctggagccgggaatgaaatattcttgagttcttacaactttatgacgagacccatgtgtggtgctattgagaaattcattgggaagttggaagacatttcaaacaacaggttgttttggtttctatagtacaattggggtggcattctgttttgtgaaaggaggaaggacttaggccagaaaactcatatgctatggttaactggttcccagcctccgagaatcttgttttccatggtgtaaaacttactcagcatcaggataagggataacgactctatggatatacagaatccttcaccatggtaaaactcgcaaacccgctttatactgagtggattttggaggccatcaaaaaagtgaaaaagcagaaacagcgtccttcagaagaaaggatatgcaatgctgtgtcttcatcccatggcttggatcgtaaaactgttttagaacaattggagttgagtgttaaagatggaacaattttaaaagtctcaaataaaggactcaattcctataaagatcctgataatcctgggcgaatagcacttcctaagcctcggaaccatggaaaattggataataaacaaaatgtggattggaataaactgataaagcgggcagttgagggcttggcagagtctggtggctcaactttgaaaagcattgaacgttttttgaaaggtcagaaggatgtgtctgcattattcggaggcagtgctgcctctggctttcaccagcagttacgattggctatcaaacgtgccattggccacggcagactccttaaagatggacctctttatcggctcaacactaaagcaaccaacgtggatgggaaagagagttgtgagtctctttcctgtttacctccagtgtcccttcttccacatgaaaaggataagccggttgctgaaccaatccccatctgtagtttctgtcttggtacaaaagaacaaaaccgagaaaagaagccagaggaactcatctcctgtgccgactgtggcaacagtggccatccatcctgtttaaagttttcccctgaactaacggttcgagtgaaggccttacggtggcagtgcatcgagtgtaaaacatgcagctcctgtcgagatcaaggcaaaaatgcggataacatgctcttttgtgattcatgtgaccgaggttttcacatggagtgttgtgatccgccactcacccgtatgccaaaaggcatgtggatatgtcaaatatgtcgacctaggaaaaaaggacgaaaacttctacaaaagaaggcagcacagataaaacggcgctatactaatccaataggacgtccaaaaaacaggttaaagaaacaaaacacggtatcaaaaggtcccttcagcaaagttcgaactggccctggaaggggtaggaaacgaaaaatcactctttccagccaatcagcatcatcatcatcagaagaaggatatttagagcggatagatggcttggacttctgcagagatagcaatgtctccttgaggttcaacaagaaaaccaaagggctcattgatggccttaccaaattttttaccccttcccctgatgggcggaaagctcggggggaagtggtggactactctgagcaatatcgaatcagaaagaggggcaacaggaaatcaagcacttcagattggcccacagacaatcaggatggctgggatggcaaacaagaaaatgaggagcgactttttgggagccaggaaatcatgactgagaaagatatggaattatttcgtgatatccaagaacaagcactgcagaaagttggagtgactggtccccctgatccacaagtccgctgtccctctgtcattgagtttgggaagtatgaaattcacacctggtactcctccccatatcctcaagaatactcaaggctgcccaaattgtatctttgtgaattttgtctaaaatatatgaaaagtagaactattctgcagcagcacatgaagaaatgtggttggttccatcctcctgccaatgagatttacagaaagaataatatttctgtctttgaggttgatgggaatgtgagtaccatttattgtcaaaacctgtgtcttttggcaaagttgtttcttgaccacaaaaccctctattacgatgtggagccatttcttttttatgtactaacacagaatgatgtcaagggctgccaccttgttggctacttttctaaggaaaagcactgccaacagaagtacaatgtttcctgtataatgattcttcctcaataccagcgtaagggctatggcaggtttctcatcgatttcagttatttgttatcaaagcgtgaaggccaagcagggtctccagagaaaccgttatctgatctgggtcgtctttcctacatggcatattggaaaagtgtaatattggagtgcctttatcaccaaaatgacaagcagatcagcattaagaagttaagcaagttgactggaatctgccctcaagacatcacttccacactccaccacctacgaatgctggacttccgtagtgaccaatttgtgattatccgccgggaaaaacttatccaggatcacatggcaaagcttcagctgaatttgcgacctgtagatgtagatccagaatgtttgcgctggactccagtcatagtgtccaactctgtggtctcagaggaggaagaagaggaggctgaggaaggagaaaacgaagagccacagtgccaggaaagagaattagagatcagtgtgggaaagtctgtgtctcatgagaacaaagaacaagattcttattcagtagaaagtgaaaagaaaccagaagttatggctccagtcagttctacacgtttgagcaaacaagtccttcctcatgatagtcttcctgcaaatagccagccatctcggaggggccgctgggggaggaagaacagaaaaacccaggaacgttttggtgataaagattctaaactgctcttggaagagacgtcttcagctcctcaggaacaatatggagaatgtggggagaaatcagaagccacccaggaacaatacactgaaagtgaagaacagctggtggcttctgaggagcagccaagccaggacgggaaacctgaccttcccaagagaagactcagtgagggggttgagccctggcgaggacagctcaagaaaagccctgaggctctgaagtgcagattaacagaaggaagtgagaggctgccccgtcgctacagtgagggtgacagggctgtcctcaggggcttcagtgagagcagcgaggaggaggaggagccggaaagccctcggtcaagctcgccaccaattctcacaaagcccacgctgaagcgaaagaaaccatttctccaccgaaggaggagagtccgaaagcgcaaacaccacaatagcagtgtagtcacagaaactatttctgagaccactgaagtgttagatgaaccttttgaagattctgactccgagaggccaatgccaagattagaacccacatttgagatcgatgaagaagaggaggaagaggatgaaaatgaacttttccctagagaatacttccgtcgtttgtcttcgcaggatgtactcaggtgtcagtcctcttctaagaggaagtctaaagatgaagaagaagatgaagagtcagatgatgctgatgacactcctatcttaaagccagtatctcttttgcgaaaacgtgatgtgaagaattctcctcttgagccagatacatccacacctttgaaaaagaaaaagggatggcccaaaggcaagagccgcaaaccaatccactggaagaaaagacctggtcgaaaaccaggatttaagttgagtcgggaaatcatgccagtttctactcaagcatgcgtcattgagcccatcgtttccattcctaaagctggacgtaaacccaagatccaggagagtgaagaaactgttgagccaaaagaagacatgcccctacccgaggagaggaaggaggaggaggagatgcaagcagaggcagaagaggctgaagagggtgaggaagaggatgcagccagcagtgaagtcccagcagcctctccagcagacagcagcaatagtcctgagaccgaaaccaaggagcctgaggtggaggaggaagaagagaagccccgtgtctcagaggagcagaggcagtcagaggaggagcagcaggaattagaggagccagagccagaggaggaggaagatgcagctgcagagactgcccagaatgacgaccacgacgctgatgatgaggatgatggccacctggagtccacaaagaaaaaggagctagaggaacagcccacgagggaagatgtcaaggaggagcctggtgttcaagagtcttttttagatgctaatatgcagaagagtagggaaaagataaaggataaagaggaaaccgagctggattccgaagaggagcagccttcccatgacacgtccgtggtgtcagagcagatggctgggtctgaggacgaccacgaagaagactcccacactaaggaagagttaatcgaattaaaagaggaggaagagattcctcatagtgagctggatctggaaactgtacaggcagtgcagtctttgactcaagaagaaagcagtgagcatgagggcgcctaccaggactgtgaggaaactcttgcggcgtgtcagaccctgcagagttacacccaggctgacgaggaccctcagatgtccatggttgaagactgtcatgcgtcagaacataatagccctatctcctccgttcagtctcaccccagccagtcagtccgttcggtcagcagtcccaacgtgcctgcccttgagagtggctacacccagatcagcccagaacaaggatccctgtccgcaccctctatgcagaacatggagaccagccccatgatggatgtgccttccgtatcagaccactctcagcaggtggtggacagcggcttcagtgacctgggcagcattgagagcaccactgaaaactatgagaacccaagcagttacgactccacgatgggcggcagcatctgtgggaacagctcttcccagagcagctgctcctacggtgggctgtcgtcctccagcagcctcacccagagcagctgtgtggtcactcagcagatggccagcatgggcagcagctgcagcatgatgcagcagagcagcgtccagcctgctgccaactgcagcatcaagtcacctcagagctgcgtggtggagaggcctcccagtaaccagcagcagcagccgccaccaccgcctccacagcagccacagccgccgccgccacaaccacaaccagcaccacagcctccaccaccccagcagcagccgcaacagcagccgcagcctcagccccagcagcctccacccccaccccctccccagcagcagcccccgctgtcacagtgtagtatgaataacagtttcaccccagctcctatgatcatggagataccagaatctggaagcactgggaacataagtatctatgagaggattccaggggattttggtgccggcagctactctcaaccatcagccaccttcagcctagccaagctgcagcagctgaccaacaccattatggaccctcatgccatgccttatagccattctcctgctgtgacttcctatgcaaccagtgtttctctgtccaatacaggactggctcagctggctccatctcatcccttagctgggactcctcaagcacaagccaccatgacgccacccccaaacttggcatccactaccatgaacctcacatctcctctgcttcagtgcaacatgtctgccaccaacattggcattcctcacacgcagagattgcaagggcaaatgccagtgaaggggcacatttccatccgctccaagtctgcgccactgccctctgcggctgctcaccagcagcagctgtatggccgtagcccatcggcagttgccatgcaggctggccctcgcgcactggctgttcagcgtggcatgaacatgggggttaatctgatgcctactcccgcctataatgtcaattccatgaatatgaacaccttgaatgccatgaacagctatcgaatgacacagcccatgatgaacagcagttaccatagtaaccctgcctacatgaaccagacagcacagtatcctatgcagatgcagatgggaatgatggggagccaggcctatacccagcagcctatgcagcctaaccctcatgggaacatgatgtacacaggcccctcccatcacagctacatgaacgctgctggcgtgcccaagcagtcactcaacggaccttacatgagaagatgagcaagatgaacttgcaatcaaaaacttaaatatatataaataaaggaaccttttatactgacaaaccagagaaaaatggacctttttccagttaaaatattgctgtagatttagaggaatttttctttggtttattttattttttagaaaacctgatcttctcttttttttgggttcattttgttgtgggttttggttttcttcacaatcttgaacattttacagtagaactcatctaaaaatggatttggggatggggaaacatgcacaaaatcttttcataattaaaaagagccttactttctttacataccacatggacagaatttgtgtaaaagtgaattatctttattttaaaatgtatgtttcccctcactgtttgcagctcccaatgttgtcatttttaaatgttatatacatctcaagggttaaccagaccctttcctccaaacccaacctttcatttcctacttcattccagcaggaggcacttaggggagactcggatggggacatggagaacaacccaagctccttaaacttattattattgttaatattattattattattattaataaagtgaggcaggaaaatgcttctccttttaaaatcccctccactcctcacacacacacacctcttgaaacccttccccaagaatgtttctttatagacggacttcattgaaatctttgttgttcttgaatcaagtgtaatataatttttttcttcttttttaaaatattcccactcagcactcagagacacaaaaatactgtaagtctcaattaacagcagaatctcagagaaaagctgtttgcaatccaaatccagcctttggaggaatagagatggtcaattaacaatcaaaaagaggagattaacctcttgtttttttaccacctggtgaatcagccataacgcacacacacgccacccagcctcttgtttctagtatgtactttgaaatgctaactgagggtcttgatgcttgagcctttgactgataaaactcaaatagcagtccccagtgatttgcctcttaggttctttcttaaattgttggtggatgactgtacattttagtgatttgaaaaataactgacaaaccattgaaacagtttattttatgttggaagagatggcgcagatgtgtgtcagaagggagatcacggtgtgagtttcgtagctatttaagtgatacatacctctagtttttgtatgtcttttgagatcctgagttcatcccctgtgaatcagagtgcacaagcacctctcctgtgagtggctaatgagaagagggacagaccgaccaccagcacagtagggcagatctggacagcagaatgttataacgcaagttcatgtgttgctcccaactccattctcttttctctcgtgcaaccagtttgcccattctcttcctattacttgctccagggataggtaaaaaaaaaa

SEQ ID NO: 133 - DNA, 2155 bp, Homo sapiens
ggccgcaggcgcaggcccgggcgacagccgagacgtggagcgcgccggctcgctgcagctccgggactcaacatgcgctgctcgccgggaggcgtctggctggcgctggccgcgtcgctcctgcacgtgtccctgcaaggcgagttccagaggaagctttacaaggagctggtcaagaactacaatcccttggagaggcccgtggccaatgactcgcaaccactcaccgtctacttctccctgagcctcctgcagatcatggacgtggatgagaagaaccaagttttaaccaccaacatttggctgcaaatgtcttggacagatcactatttacagtggaatgtgtcagaatatccaggggtgaagactgttcgtttcccagatggccagatttggaaaccagacattcttctctataacagtgctgatgagcgctttgacgccacattccacactaacgtgttggtgaattcttctgggcattgccagtacctgcctccaggcatattcaagagttcctgctacatcgatgtacgctggtttccctttgatgtgcagcactgcaaactgaagtttgggtcctggtcttacggaggctggtccttggatctgcagatgcaggaggcagatatcagtggctatatccccaatggagaatgggacctagtgggaatccccggcaagaggagtgaaaggttctatgagtgctgcaaagagccctaccccgatgtcaccttcacagtgaccatgcgccgcaggacgctctactatggcctcaacctgctgatcccctgtgtgctcatctccgccctcgccctgctggtgttcctgcttcctgcagattccggggagaagatttccctggggataacagtcttactctctcttaccgtcttcatgctgctcgtggctgagatcatgcccgcaacatccgattcggtaccattgatagcccagtacttcgccagcaccatgatcatcgtgggcctctcggtggtggtgacggtgatcgtgctgcagtaccaccaccacgaccccgacgggggcaagatgcccaagtggaccagagtcatccttctgaactggtgcgcgtggttcctgcgaatgaagaggcccggggaggacaaggtgcgcccggcctgccagcacaagcagcggcgctgcagcctggccagtgtggagatgagcgccgtggcgccgccgcccgccagcaacgggaacctgctgtacatcggcttccgcggcctggacggcgtgcactgtgtcccgacccccgactctggggtagtgtgtggccgcatggcctgctcccccacgcacgatgagcacctcctgcacggcgggcaaccccccgagggggacccggacttggccaagatcctggaggaggtccgctacattgccaaccgcttccgctgccaggacgaaagcgaggcggtctgcagcgagtggaagttcgccgcctgtgtggtggaccgcctgtgcctcatggccttctcggtcttcaccatcatctgcaccatcggcatcctgatgtcggctcccaacttcgtggaggccgtgtccaaagactttgcgtaaccacgcctggttctgtacatgtggaaaactcacagatgggcaaggcctttggcttggcgagatttgggggtgctaatccaggacagcattacacgccacaactccagtgttcccttctggctgtcagtcgtgttgcttacggtttctttgttactttaggtagtagaatctcagcactttgtttcatattctcagatgggctgatagatatccttggcacatccgtaccatcggtcagcagggccactgagtagtcattttgcccattagcccactgcctggaaagcccttcggagagctccccatggctcctcaccaccgagacagttggttttgcatgtctgcatgaaggtctacctgaaaattcaacatttgctttttgcttgtgtacaaacccagattgaagctaaaataaaccagactcactaaatcctttccaataattgactggtggaaggaaaacaaaaaacaaaaactaaaaacctcttagcttttctgcaattcaactttttatttttatttttatttctatcaaagacggtagagagaaacagcttgatgctgtttctacatt

SEQ ID NO: 134 - DNA, 5097 bp, Homo sapiens
ctgcaggaaggagagaggaagaggagcagaagggggcagcagcggacgccgctaacggcctccctcggcgctgacaggctgggccggcgcccggctcgcttgggtgttcgcgtcgccacttcggcttctcggccggtcgggcccctcggcccgggcttgcggcgcgcgtcggggctgagggctgctgcggcgcagggagaggcctggtcctcgctgccgagggatgtgagtgggagctgagcccacactggagggcccccgagggcccagcctggaggtcgttcagagccgtgcccgccccggggcttcgcagaccttgacccgccgggtaggagccgcccctgcgggctcgagggcgcgctctggtcgcccgatctgtgtagccggtttcagaagcaggcaacaggaacaagatgtgaactgtttctcttctgcagaaaaagaggctcttcctcctcctcccgcgacggcaaatgttctgaaaaagactctgcatgggaatggcctgccttacgatgacagaaatggagggaacatccacctcttctatatatcagaatggtgatatttctggaaatgccaattctatgaagcaaatagatccagttcttcaggtgtatctttaccattcccttgggaaatctgaggcagattatctgacctttccatctggggagtatgttgcagaagaaatctgtattgctgcttctaaagcttgtggtatcacacctgtgtatcataatatgtttgctttaatgagtgaaacagaaaggatctggtatccacccaaccatgtcttccatatagatgagtcaaccaggcataatgtactctacagaataagattttactttcctcgttggtattgcagtggcagcaacagagcctatcggcatggaatatctcgaggtgctgaagctcctcttcttgatgactttgtcatgtcttacctctttgctcagtggcggcatgattttgtgcacggatggataaaagtacctgtgactcatgaaacacaggaagaatgtcttgggatggcagtgttagatatgatgagaatagccaaagaaaacgatcaaaccccactggccatctataactctatcagctacaagacattcttaccaaaatgtattcgagcaaagatccaagactatcatattttgacaaggaagcgaataaggtacagatttcgcagatttattcagcaattcagccaatgcaaagccactgccagaaacttgaaacttaagtatcttataaatctggaaactctgcagtctgccttctacacagagaaatttgaagtaaaagaacctggaagtggtccttcaggtgaggagatttttgcaaccattataataactggaaacggtggaattcagtggtcaagagggaaacataaagaaagtgagacactgacagaacaggatttacagttatattgcgattttcctaatattattgatgtcagtattaagcaagcaaaccaagagggttcaaatgaaagccgagttgtaactatccataagcaagatggtaaaaatctggaaattgaacttagctcattaagggaagctttgtctttcgtgtcattaattgatggatattatagattaactgcagatgcacatcattacctctgtaaagaagtagcacctccagccgtgcttgaaaatatacaaagcaactgtcatggcccaatttcgatggattttgccattagtaaactgaagaaagcaggtaatcagactggactgtatgtacttcgatgcagtcctaaggactttaataaatattttttgacttttgctgtcgagcgagaaaatgtcattgaatataaacactgtttgattacaaaaaatgagaatgaagagtacaacctcagtgggacaaagaagaacttcagcagtcttaaagatcttttgaattgttaccagatggaaactgttcgctcagacaatataattttccagtttactaaatgctgtcccccaaagccaaaagataaatcaaaccttctagtcttcagaacgaatggtgtttctgatgtaccaacctcaccaacattacagaggcctactcatatgaaccaaatggtgtttcacaaaatcagaaatgaagatttgatatttaatgaaagccttggccaaggcacttttacaaagatttttaaaggcgtacgaagagaagtaggagactacggtcaactgcatgaaacagaagttcttttaaaagttctggataaagcacacagaaactattcagagtctttctttgaagcagcaagtatgatgagcaagctttctcacaagcatttggttttaaattatggagtatgtgtctgtggagacgagaatattctggttcaggagtttgtaaaatttggatcactagatacatatctgaaaaagaataaaaattgtataaatatattatggaaacttgaagttgctaaacagttggcatgggccatgcattttctagaagaaaacacccttattcatgggaatgtatgtgccaaaaatattctgcttatcagagaagaagacaggaagacaggaaatcctcctttcatcaaacttagtgatcctggcattagtattacagttttgccaaaggacattcttcaggagagaataccatgggtaccacctgaatgcattgaaaatcctaaaaatttaaatttggcaacagacaaatggagttttggtaccactttgtgggaaatctgcagtggaggagataaacctctaagtgctctggattctcaaagaaagctacaattttatgaagataggcatcagcttcctgcaccaaagtgggcagaattagcaaaccttataaataattgtatggattatgaaccagatttcaggccttctttcagagccatcatacgagatcttaacagtttgtttactccagattatgaactattaacagaaaatgacatgttaccaaatatgaggataggtgccctagggttttctggtgcctttgaagaccgggatcctacacagtttgaagagagacatttgaaatttctacagcaacttggcaagggtaattttgggagtgtggagatgtgccggtatgaccctctacaggacaacactggggaggtggtcgctgtaaaaaagcttcagcatagtactgaagagcacctaagagactttgaaagggaaattgaaatcctgaaatccctacagcatgacaacattgtaaagtacaagggagtgtgctacagtgctggtcggcgtaatctaaaattaattatggaatatttaccatatggaagtttacgagactatcttcaaaaacataaagaacggatagatcacataaaacttctgcagtacacatctcagatatgcaagggtatggagtatcttggtacaaaaaggtatatccacagggatctggcaacgagaaatatattggtggagaacgagaacagagttaaaattggagattttgggttaaccaaagtcttgccacaagacaaagaatactataaagtaaaagaacctggtgaaagtcccatattctggtatgctccagaatcactgacagagagcaagttttctgtggcctcagatgtttggagctttggagtggttctgtatgaacttttcacatacattgagaagagtaaaagtccaccagcggaatttatgcgtatgattggcaatgacaaacaaggacagatgatcgtgttccatttgatagaacttttgaagaataatggaagattaccaagaccagatggatgcccagatgagatctatatgatcatgacagaatgctggaacaataatgtaaatcaacgcccctcctttagggatctagctcttcgagtggatcaaataagggataacatggctggatgaaagaaatgaccttcattctgagaccaaagtagatttacagaacaaagttttatatttcacattgctgtggactattattacatatatcattattatataaatcatgatgctagccagcaaagatgtgaaaatatctgctcaaaactttcaaagtttagtaagtttttcttcatgaggccaccagtaaaagacattaatgagaattccttagcaaggattttgtaagaagtttcttaaacattgtctgttaacatcactcttgtctggcaaaagaaaaaaaatagactttttcaactcagctttttgagacctgaaaaaattattatgtaaattttgcaatgttaaagatgcacagaatatgtatgtatagtttttaccacagtggatgtataataccttggcatcttgtgtgatgttttacacacatgagggctggtgttcattaatactgttttctaatttttccatagttaatctataattaattacttcactatacaaacaaattaagatgttcagataattgaataagtacctttgtgtccttgttcatttatatcgctggccagcattataagcaggtgtatacttttagcttgtagttccatgtactgtaaatatttttcacataaagggaacaaatgtctagttttatttgtataggaaatttccctgaccctaaataatacattttgaaatgaaacaagcttacaaagatataatctattttattatggtttcccttgtatctatttgtggtgaatgtgttttttaaatggaactatctccaaatttttctaagactactatgaacagttttcttttaaaattttgagattaagaatgccaggaatattgtcatcctttgagctgctgactgccaataacattcttcgatctctgggatttatgctcatgaactaaatttaagcttaagccataaaatagattagattgttttttaaaaatggatagctcattaagaagtgcagcaggttaagaattttttcctaaagactgtatatttgaggggtttcagaattttgcattgcagtcatagaagagatttatttcctttttagaggggaaatgaggtaaataagtaaaaaagtatgcttgttaattttattcaagaatgccagtagaaaattcataacgtgtatctttaagaaaaatgagcatacatcttaaatcttttcaatta

SEQ ID NO: 135 - DNA, 1829 bp, Homo sapiens
gggggccgtcagggccccagggagcgcggggcgccgctgctgctgttcttcggctcggttctgtctaccgggcagcgccggggccggcggctgcggcggcagaggaacaggagccgggagccgcgttccgccgagagttgggcagaggagcgcccgcgccccggcggcgtcatgggccccctccccgcgcttcagagggcaccagccgcgggaacccccgggcctcctcgcgcccgagcctgagcgaccctcgggttctccggcgccccctccctcgccctattttttttcctactctcgctgccgttaccgcttctgctctccgttatggcaacagagccaccatcccccctccgggtcgaggcgccgggccccccagaaatgcggacctcaccggcgatcgagtccacccctgagggcaccccgcagccggcgggcggcagactccgcttcctcaacggctgcgtgcccctctcgcatcaggtggccgggcacatgtacgggaaggacaaagtgggtatactgcaacatccagatggcacagttttgaaacagttacaaccacctccaaggggcccaagagagctggaattctataatatggtttatgctgctgactgttttgatggtgttcttctagagctacgaaaatatttgccaaaatattatggcatctggtcacctcccactgcaccaaacgatttatacctaaaactggaagatgtgacccataaatttaataagccctgtataatggatgtaaagatagggcaaaaaagctatgatccttttgcctcatctgagaagattcagcaacaggtcagcaagtacccattaatggaagagattgggttcttggtgcttggcatgagggtttatcatgttcattccgatagctatgagacagaaaaccagcattacggaagaagcttaacaaaagaaactataaaggatggagtctccagattttttcataatgggtactgcttaagaaaagatgctgttgctgccagtattcagaagattgagaaaattctgcagtggtttgaaaaccagaagcagcttaatttttacgcaagttcattactctttgtttatgaaggttcatctcagccaaccactacaaaattgaatgacagaactttggcagaaaagtttttgtccaaaggacaactgtcagacacagaagtactagagtacaataataactttcatgtgttaagttccacagctaatggaaaaatagagtcttcagtgggcaaaagcttgtccaagatgtatgcgcgtcacaggaaaatatatacaaaaaagcatcacagtcagacttcattgaaagttgaaaatctggagcaagacaatgggtggaaaagcatgtcacaggaacatttaaatggaaatgtactttcccaactggaaaaagttttctaccatcttcccactggttgccaagagattgctgaagtagaagtgcgaatgatagattttgctcatgtgttccctagcaacacaatagatgagggatatgtttatgggctaaagcatttaatttctgtacttcgaagtattttagacaattgaatcctctgttgcagtctttttaaggggtgggccaatcataatgaagaggggcagtcaatatctgcacctttaatgctatgtaaaaaatttgtattatgagtcgacattttatttgtctttatacttttggaagaatggttaacttttttataatcttactcaggaaaactaactatttgttcattagaaaactatgaagaataaagaaacttaggaatggtaaaaaaaaaaaaaaaaaaaaaaaaaaaaaa

SEQ ID NO: 136 - DNA, 9432 bp, Homo sapiens
gccgtggctccggtagcagcaagttcgaaccccgctcccgctccgcttcggttctcgctccttcggcccttgggcctccaaacaccagtccccggcagctcgttgcgcattgcgctctccccgccaccaggatgccggtaaccgagaaggatctagctgaggacgcgccttggaagaagatccagcagaacacgttcacacgctggtgcaacgagcacctcaagtgcgtgaacaaacgcatcggcaacctgcagaccgacctgagcgacgggctgcggctcatcgcgctgctcgaggtgctcagccagaagcgcatgtaccgcaagtaccatcagcggcccacctttcgccagatgcagctcgagaatgtgtccgtggcgctcgagttcctggaccgtgagagcatcaagctcgtgtccatcgatagcaaagccattgtggatgggaacctgaagctcatcttgggtctggtgtggacgctgatcctccactactccatctccatgcccgtgtgggaggatgaaggggatgatgatgccaagaagcagacgccaaagcagaggctgctggggtggattcagaacaagatcccctacttgcccatcaccaactttaaccagaactggcaagacggcaaagccctgggagccctggtagacagctgtgctccaggtctgtgcccagactgggaatcctgggacccgcagaagcctgtggataatgcacgagaagccatgcagcaggcagatgactggctgggtgtcccacaggtcatcactcctgaagaaatcattcacccggatgtggacgagcactcagttatgacttacctgtcccagttccccaaagccaagctcaagccgggggctcctctcaaacccaaactcaacccgaagaaagccagggcctatggcagaggaatcgagcccactggaaacatggtgaagcagccagccaagttcactgtggacaccatcagcgccgggcaaggagacgtgatggtgtttgttgaggacccagaagggaacaaagaggaggcacaagtgacccctgacagcgacaagaacaagacatactctgtggagtatctgcccaaggtcaccgggctacacaaagtcacagtcctctttgcaggacagcacatctccaagagcccatttgaagtgagtgttgacaaggcccagggagatgccagtaaagtcactgcaaaaggtccagggttggaagctgtagggaacatcgccaataagcccacctactttgacatctatacggcaggagctggtgtgggtgacattggtgtggaggtggaagatccccaggggaagaacaccgtggagttgctcgtggaagacaaaggaaaccaggtgtatcgatgtgtgtacaaacccatgcagcctggccctcacgtggtcaagatcttctttgctggggacactattcctaagagtcccttcgttgtgcaggttggggaagcctgcaatccaaatgcctgccgggccagtggccgaggcctacaacccaaaggcgtccgtatccgggagaccacagatttcaaggttgacaccaaagctgcaggaagtggggagctcggggtaaccatgaagggtcctaagggtctggaggagctggtgaagcagaaagactttctggatggggtctacgcattcgagtattaccccagcaccccggggagatacagcattgccatcacatgggggggacaccacattccaaagagcccctttgaagttcaagttggccctgaagcgggtatgcagaaagtccgtgcttggggccctgggctccatggtgggattgtcgggcggtcagcggacttcgtggtagaatccattggctctgaagtggggtctctggggtttgccattgaaggcccctctcaggcaaagattgagtacaacgaccagaatgatggatcgtgtgatgtcaaatactggcccaaggagcctggcgaatatgctgttcacatcatgtgtgacgacgaagacatcaaggacagcccgtacatggccttcatccacccagccacgggaggctacaaccctgatctggttcgagcatacgggccaggtttggagaaatctggatgcattgtcaacaacctggccgagttcactgtggatcctaaggatgctggaaaagctcccttaaagatatttgctcaggatggggaaggccaacgcattgacatccagatgaagaaccggatggacggcacatatgcatgctcatacaccccggtgaaggccatcaagcacaccattgctgtggtctggggaggcgtgaacatcccgcacagcccctacagggtcaacatcgggcaaggtagccatcctcagaaggtcaaagtgtttgggccaggtgtggagagaagtggtctgaaggcaaatgaacctacacacttcacggtggactgtactgaggctggggaaggtgatgtcagtgttggcattaagtgtgatgcccgggtgttaagtgaagatgaggaagacgtggattttgacattattcacaatgccaatgatacgttcacagtcaaatatgtgcctcctgctgctgggcgatacactatcaaagttctctttgcatctcaggaaatccccgccagccctttcagagtcaaagttgacccttcccacgatgccagcaaagtgaaggcagaaggcccagggctcagcaaagcaggtgtggaaaatgggaaaccgacccacttcactgtctacaccaagggggctgggaaagccccgctcaacgtgcagttcaacagccctcttcctggcgatgcagtgaaggatttggatatcatcgataattatgactactctcacacggttaaatatacacccacccaacagggcaacatgcaggttctggtgacttacggtggcgatcccatccctaaaagccctttcactgtgggtgttgctgcaccgctggatctgagcaagataaaactcaatgggctggaaaacagggtggaagttgggaaggatcaggagttcaccgttgataccaggggggcaggaggccaggggaagctggacgtgacaatcctcagcccctctcggaaggtcgtgccatgcctagtgacacctgtgacaggccgggagaacagcacggccaagttcatccctcgggaggaggggctgtatgctgtagacgtgacctacgatggacaccctgtgcccgggagcccctacacagtggaggcctcgctgccaccagatcccagcaaggtgaaggcccacggtcccggcctcgaaggtggtctcgtgggcaagcctgccgagttcaccatcgataccaaaggagctggtactggaggtctgggcttaacggtggaaggtccgtgcgaggccaaaatcgagtgctccgacaatggtgatgggacctgctccgtctcttaccttcccacaaaacccggggagtacttcgtcaacatcctctttgaagaagtccacatacctgggtctcccttcaaagctgacattgaaatgccctttgacccctctaaagtcgtggcatcggggccaggtctcgagcacgggaaggtgggtgaagctggcctccttagcgtcaactgctcggaagcgggaccgggggccctgggcctggaagctgtctcggactcgggaacaaaagccgaagtcagtattcagaacaacaaagatggcacctacgcggtgacctacgtgcccctgacggccggcatgtacacgttgaccatgaagtatggtggcgaactcgtgccacacttccccgcccgggtcaaggtggagcccgccgtggacaccagcaggatcaaagtctttggaccaggaatagaagggaaagatgtgttccgggaagctaccaccgactttacagttgactctcggccgctgacccaggttgggggtgaccacatcaaggcccacattgccaacccctcaggggcctccaccgagtgctttgtcacagacaatgcggatgggacctaccaggtggaatacacaccctttgagaaaggtctccatgtagtggaggtgacatatgatgacgtgcctatcccaaacagtcccttcaaggtggctgtcactgaaggctgccagccatctagggtgcaagcccaaggacctggattgaaagaggcctttaccaacaagcccaatgtcttcaccgtggttaccagaggcgcaggaattggtgggcttggcataactgttgagggaccatcagagtcgaagataaattgcagagacaacaaggatggcagctgcagtgctgagtacattcctttcgcgccgggggattacgatgttaatatcacatatggaggagcccacatccctggcagccccttcagggttcctgtgaaggatgttgtggaccccagcaaggtcaagattgccggccccgggctgggctcaggcgtccgagcccgtgtcctgcagtccttcacggtggacagcagcaaggctggcctggctccgctggaagtgagggttctgggcccacgaggcttggtggagccagtgaacatggtggacaatggagatggcacacacacagtaacctacaccccatctcaggagggaccttacatggtctcagttaaatatgctgatgaagagattcctcgcagtcccttcaaggtcaaggtccttcccacatatgatgccagcaaagtgactgccagtggccccggccttagttcctatggtgtgcctgccagtctacctgtggactttgcaattgatgcccgagatgccggggaaggcctgcttgctgttcaaataacggaccaagaaggaaaacccaaaagagccattgtccatgacaataaagatggcacgtatgctgtcacctacatccccgacaagactgggcgctatatgattggagtcacctacgggggtgacgacatcccactttctccttatcgcatccgagccacacagacgggtgatgccagcaagtgcctggccacgggtcctggaatcgcctccactgtgaaaactggcgaagaagtaggctttgtggttgatgccaagactgccgggaagggtaaagtgacctgcacggttctgaccccagatggcactgaggccgaggccgatgtcattgagaatgaagatggaacctatgacatcttctacacagctgccaagccgggcacatatgtgatctatgtgcgcttcggtggtgttgatattcctaacagccccttcactgtcatggccacagatggggaagtcacagccgtggaggaggcaccggtaaatgcatgtccccctggattcaggccctgggtgaccgaagaggcctatgtcccagtgagtgacatgaacggcctgggatttaagccttttgacctggtcattccgtttgctgtcaggaaaggagaaatcactggagaggtccacatgccttctgggaagacagccacacctgagattgtggacaacaaggacggcacggtcactgttagatatgcccccactgaggtcgggctccatgagatgcacatcaaatacatgggcagccacatccctgagagcccactccagttctacgtgaactaccccaacagtggaagtgtttctgcatacggtccaggcctcgtgtatggagtggccaacaaaactgccaccttcaccatcgtcacagaggatgcaggagaaggtggtctggacttggctattgagggcccctcaaaagcagaaatcagctgcattgacaataaagatgggacatgcacagtgacctacctgccgactctgccaggcgactacagcattctggtcaagtacaatgacaagcacatccctggcagccccttcacagccaagatcacagatgacagcaggcggtgctcccaggtgaagttgggctcagccgctgacttcctgctcgacatcagtgagactgacctcagcagcctgacggccagcattaaggccccatctggccgagacgagccctgtctcctgaagaggctgcccaacaaccacattggcatctccttcatcccccgggaagtgggcgaacatctggtcagcatcaagaaaaatggcaaccatgtggccaacagccccgtgtctatcatggtggtccagtcggagattggtgacgcccgccgagccaaagtctatggccgcggcctgtcagaaggccggactttcgagatgtctgacttcatcgtggacacaagggatgcaggttatggtggcatatccttggcggtggaaggccccagcaaagtggacatccagacggaggacctggaagatggcacctgcaaagtctcctacttccctaccgtgcctggggtttatatcgtctccaccaaattcgctgacgagcacgtgcctgggagcccatttaccgtgaagatcagtggggagggaagagtcaaagagagcatcacccgcaccagtcgggccccgtccgtggccactgtcgggagcatttgtgacctgaacctgaaaatcccagaaatcaacagcagtgatatgtcggcccacgtcaccagcccctctggccgtgtgactgaggcagagattgtgcccatggggaagaactcacactgcgtccggtttgtgccccaggagatgggcgtgcacacggtcagcgtcaagtaccgtgggcagcacgtcaccggcagccccttccagttcaccgtggggccacttggtgaaggaggcgcccacaaggtgcgggcaggaggccctggcctggagagaggagaagcgggagtcccagctgagttcagcatttggacccgggaagcaggcgctggaggcctctccatcgctgttgagggccccagtaaggccgagattacattcgatgaccataaaaatgggtcgtgcggtgtatcttatattgcccaagagcctggtaactacgaggtgtccatcaagttcaatgatgagcacatcccggaaagcccctacctggtgccggtcatcgcaccctccgacgacgcccgccgcctcactgttatgagccttcaggaatcgggattaaaagttaaccagccagcatcctttgctataaggttgaatggcgcaaaaggcaagattgatgcaaaggtgcacagcccctctggagccgtggaggagtgccacgtgtctgagctggagccagataagtatgctgttcgcttcatccctcatgagaatggtgtccacaccatcgatgtcaagttcaatgggagccacgtggttggaagccccttcaaagtgcgcgttggggagcctggacaagcggggaaccctgccctggtgtccgcctatggcacgggactcgaagggggcaccacaggtatccagtcggaattctttattaacaccacccgagcaggtccagggacattatccgtcaccatcgaaggcccatccaaggttaaaatggattgccaggaaacacctgaagggtacaaagtcatgtacacccccatggctcctggtaactacctgatcagtgtcaaatacggtgggcccaaccacatcgtgggcagtcccttcaaggccaaggtgacaggccagcgtctagttagccctggctcagccaacgagacctcatccatcctggtggagtcagtgaccaggtcgtctacagagacctgctatagcgccattcccaaggcatcctcggacgccagcaaggtgacctctaagggggcagggctctcaaaggcctttgtgggccagaagagttccttcctggtggactgcagcaaagctggctccaacatgctgctgatcggggtccatgggcccaccaccccctgcgaggaggtctccatgaagcatgtaggcaaccagcaatacaacgtcacatacgtcgtcaaggagaggggcgattatgtgctggctgtgaagtggggggaggaacacatccctggcagcccttttcatgtcacagtgccttaaaacagttttctcaaatcctggagagagttcttgtggttgcttttgttgcttgtttgtaattcattttatacaaagccctccagcctgtttgtggggctgaaaccccatccctaaaatattgctgttgtaaaatgccttcagaaataagtcctagactggactcttgagggacatattggagaatcttaagaaatgcaagcttgttcagggggctgagaagatcctgagtacactaggtgcaaaccagaactcttggtggaacagaccagccactgcagcagacagaccaggaacacaatgagactgacatttcaaaaaaacaaaactggctagcctgagctgctggttcactcttcagcatttatgaaacaaggctaggggaagatgggcagagaaaaaggggacacctagtttggttgtcatttggcaaaggagatgacttaaaatccgcttaatctcttccagtgtccgtgttaatgtatttggctattagatcactagcactgctttaccgctcctcatcgccaacacccccatgctctgtggccttcttacacttctcagagggcagagtggcagccgggcaccctacagaaactcagagggcagagtggcagccaggcccacatgtctctcaagtacctgtcccctcgctctggtgattatttcttgcagaatcaccacacgagaccatcccggcagtcatggttttgctttagttttccaagtccgtttcagtcccttccttggtctgaagaaattctgcagtggcgagcagtttcccacttgccaaagatcccttttaaccaacactagcccttgtttttaacacacgctccagcccttcatcagcctgggcagtcttaccaaaatgtttaaagtgatctcagaggggcccatggattaacgccctcatcccaaggtccgtcccatgacataacactccacacccgccccagccaacttcatgggtcactttttctggaaaataatgatctgtacagacaggacagaatgaaactcctgcggctctttggcctgaaagttgggaatggttgggggagagaagggcagcagcttattggtggtcttttcaccattggcagaaacagtgagagctgtgtggtgcagaaatccagaaatgaggtgtagggaattttgcctgccttcctgcagacctgagctggctttggaatgaggttaaagtgtcagggacgttgcctgagcccaaatgtgtagtgtggtctgggcaggcagacctttaggttttgctgcttagtcctgaggaagtggccactcttgtggcaggtgtagtatctggggcgagtgttgggggtaaaagcccaccctacagaaagtggaacagcccggacctgatgtgaaaggaccacgggtgttgtaagctgggaccggaaccaaactggaatcaaacgcgactgtaaattgtatcttataacttattaaataaaacattgctccgtaaaaaaaaaaa

SEQ ID NO: 137 - DNA, 2762 bp, Homo sapiens
gccaagcatacatctctaattttattattttggtcttttcgttggattttccctttcttctttttttcgggttatcgctcagttttgagcagaggtttacattttttaaaaatttgctttccagcccgccttgatcttctaagtgcgagttcatcgtctgagaaaaaaaaaaatctctggttggcgtttttgtttcttttcttttctttcttttctttcctttttttttttttttaatttttttcaagggggaggagattttccacaagaaaaggttgttttcatgtttgggattcaggaaagcatccaacggagtggaagcagcatgaaggaagagccgctgggcagcggcatgaacgcggtgcggacgtggatgcagggcgccggggtgctggacgccaacacggcggcgcagagcggggtgggtctggcccgggctcactttgagaagcagccgccttccaatctgcggaaatccaacttcttccacttcgtcctggccctctacgacagacagggccagcccgtggagatcgagaggacagcgtttgtggggttcgtggagaaggaaaaagaagccaacagcgaaaagaccaataacggaattcactaccggcttcagcttctctacagcaatgggataaggacggagcaggatttctacgtgcgcctcattgactccatgacaaaacaagccatagtgtatgaaggccaagacaagaacccagaaatgtgccgagtcttgctcacacatgagatcatgtgcagccgctgttgtgacaagaaaagctgtggcaaccgaaatgagactccctcagatccagtgataattgacaggttcttcttgaaatttttcctcaaatgtaaccaaaattgcctaaagaatgcgggaaacccacgtgacatgcggagattccaggtcgtggtgtctacgacagtcaatgtggatggccatgtcctggcagtctctgataacatgtttgtccataataattccaagcatgggcggagggctcggaggcttgacccctcggaaggtacgccctcttatctggaacatgctactccctgtatcaaagccatcagcccgagtgaaggatggacgacgggaggtgcgactgtgatcatcataggggacaatttctttgatgggttacaggtcatattcggtaccatgctggtctggagtgagttgatcactcctcatgccatccgtgtgcagacccctcctcggcacatccctggtgttgtggaagtcacactgtcctacaaatctaagcagttctgcaaaggaacaccaggcagattcatttatacagcgctcaacgaacccaccatcgattatggtttccagaggttacagaaggtcattcctcggcaccctggtgaccctgagcgtttgccaaaggaagtaatactcaaaagggctgcggatctggtagaagcactgtatgggatgccacacaacaaccaggaaatcattctgaagagagcggccgacattgccgaggccctgtacagtgttccccgcaaccacaaccaactcccggcccttgctaacacctcggtccacgcagggatgatgggcgtgaattcgttcagtggacaactggccgtgaatgtctccgaggcatcacaagccaccaatcagggtttcacccgcaactcaagcagcgtatcaccacacgggtacgtgccgagcaccactccccagcagaccaactataactccgtcaccacgagcatgaacggatacggctctgccgcaatgtccaatttgggcggctcccccaccttcctcaacggctcagctgccaactccccctatgccatagtgccatccagccccaccatggcctcctccacaagcctcccctccaactgcagcagctcctcgggcatcttctccttctcaccagccaacatggtctcagccgtgaaacagaagagtgctttcgcaccagtcgtcagaccccagacctccccacctcccacctgcaccagcaccaacgggaacagcctgcaagcgatatctggcatgattgttcctcctatgtgaaagaattgccttgaagaattgtattaatgaagaggttggattctgctacagagagtaatctgatacaagtcccagagtggaacttttaactcaggcctttttaagaggaatcacaataactgcagatttttaaacaaacaaaatcaccgaccttgcaaatactgaaattggaagagggatctgcaagtgcagggtgttggttaaagttgtacctcccaagtatttgggggatatatttattctgtattgacaaaagcaaatccactttttctttttcttttttttttttaagcttaattctgcaatcatttgtcttttataaaccgtaaagctctatacaagggacactataaataagactccatgttttaatttatgatgtttttaaagctgtgtaaaggaagaatgaagtggtgatatttacaaaaaagtaaaaaaaaaaaaaaagaaaaaaaggaaaaaaaaaaaaaaaaaaaaaaaaaaataggaatgccagttagattttttagaaaaactaagggtcggcttttgcgccttaaagcatatcaaatggtagttagctcagacagtgcattttcaatatctaacttaacatgccaccccttagcagtgcaagcttatttatctcttttgtattgttgtcttaagcaactgtgtaaataaatgcagcctggaaagttaaaacgcgaaaaaaaaaaaaaaa

SEQ ID NO: 138 - DNA, 1549 bp, Homo sapiens
cgtgcgacagcgacccagccacccccggagcgcagtccccgaaggatgataatgaagataattcaaatgatgggacccagccatccaaaaggaggcgaatgggctcaggagatagttctaggagttgtgaaacttcaagtcaagatcttggttttagttactatccagcagaaaacttgatagagtacaaatggccacctgatgaaacaggagaatactatatgcttcaagaacaagtcagtgaatatttgggtgtgacctcctttaaaaggaaatatccagatttagagcgacgagatttgtctcacaaggagaaactctacctgagagagctaaatgtcattactgaaactcagtgcactctaggcttaacagcattgcgcagtgatgaagtgattgatttaatgataaaagaatatccagccaaacatgctgagtattctgttattctacaagaaaaagaacgtcaacgaattacagaccattataaagagtattcccaaatgcaacaacagaatactcagaaagttgaagccagtaaagtgcctgagtatattaagaaagctgccaaaaaagcagcagaatttaatagcaacttaaaccgggaacgcatggaagaaagaagagcttattttgacttgcagacacatgttatccaggtacctcaagggaagtacaaagttttgccaacagagcgaacaaaggtcagttcttacccagtggctctcatccccggacagttccaggaatattataagaggtactcaccagatgagctgcggtatctgccattaaacacagccctgtatgagccccctctggatcctgagctccctgctctagacagtgatggtgattcagatgatggcgaagatggtcgaggtgatgagaaacggaaaaataaaggcacttcggacagctcctctggcaatgtatctgaaggggaaagccctcctgacagccaggaggactctttccagggaagacagaaatcaaaagacaaagctgccactccaagaaaagatggtcccaaacgttctgtactgtccaagtcagttcctgggtacaagccaaaggtcattccaaatgctatatgtggaatttgtctgaagggtaaggagtccaacaagaaaggaaaggctgaatcacttatacactgctcccaatgtgagaatagtggccatccttcttgcctggatatgacaatggagcttgtttctatgattaagacctacccatggcagtgtatggaatgtaaaacatgcattatatgtggacaaccccaccatgaagaagaaatgatgttctgtgatatgtgtgacagaggttatcatactttttgtgtgggccttggtgctattccatcaggtcgctggatttgtgactgttgtcagcgggcccccccaacacccaggaaagtgggcagaagggggaaaaacagcaaagagggataaaatagtttttgactctaatactgtatatgcatttaagtggaatatttggtgccatttacaacattattttcatgccaataaaagattttttttgc

SEQ ID NO: 139 - DNA, 6644 bp, Homo sapiens
gtgaccccaggccctggtcactccatgctttggagggtgcttttgtcaaagaggcctcctttccctcacccagagctggatttccaagaggctcccatacctagctgccctggcagactcccagggaggaaaaacagcgtggccttggcagctgccccgaggaaggagcccacaggtgacagggagaagccattgccattccctgtcctggcccccttcagcaaccctgaacactctgctccagccaaggtggtgagggcagctgttcctaaacagcgcaaaggcagcaaggttggtgactttggagatgcaatcaattggcccacacctggagagatagcccacaagagtgttcagccacagtcccacaagcctcagcctacccgtaaactgccacccaagaaggacatgaaggaacaggagaaaggagaagggagtgatagtaaggagagtccaaaaaccaaatcagatgaatcaggggaggaaaagaatggagatgaggattgccagcgaggcgggcagaagaagaaaggaaacaaacacaagtgggttccattacaaatagacatgaagcctgaagtgcccagagagaaactggcttcacgccccactcgcccaccggagcctagacacatacctgccaatcgcggagagatcaaagggtctgagtctgccacctacgtgcccgtggccccccccaccccagcctggcaaccagagatcaaaccggagcctgcctggcacgaccaggatgagacatcgagtgtgaagagtgatggggctggtggggcgcgggcttccttccgtggccgtggacgggggcgtggtcgcggccggggacgcggccggggtggcactcgaacccattttgactaccagtttggctaccgaaagtttgatggtgtggaggggcctcgtacgcccaagtacatgaacaacatcacctactactttgacaatgtcagcagcaccgagctttacagtgtggatcaggaactgctcaaagactacatcaagcgccagattgaatactacttcagcgtggacaatttagagcgagacttcttcctgcgaaggaaaatggatgctgatggtttcctacccatcacccttattgcttccttccaccgagtgcaggcccttaccactgacatttcactcatctttgcggccctaaaggacagcaaggtggtggagatcgttgatgagaaagttcgtaggagggaggaaccagaaaagtggcctcttcccccaatagtggattattcacagactgatttctcccagcttctcaactgccctgaatttgttccccgtcagcactaccaaaaggagacagagtcggcacctggctctcctcgtgcagtcaccccagtgccaaccaaaacagaggaggtcagcaacctaaagacactacccaagggcctgtctgccagcctgcctgacctggattctgagaactggattgaagtgaagaagaggcctcggccatccccagcacggcccaagaagtcagaggagtccagattttcccacctgacctctctgcctcagcagctgccttcccagcagctgatgtccaaggatcaggatgagcaagaggaactggattttctgtttgacgaggagatggagcagatggatgggcggaagaacaccttcactgcctggtctgatgaggaatctgactatgagattgatgacagggatgtcaacaagatcctcattgtcacccagacaccacattacatgcgccggcacccagggggggaccgcacaggcaaccacacctcgcgtgccaagatgagcgccgaactggccaaggtcattaatgatggcctcttctactatgagcaggacctgtgggctgaaaagtttgaacctgagtattcccagatcaagcaagaagtcgagaacttcaaaaaggtcaatatgatcagccgggagcagtttgacacactgacccctgagccccctgtggatcccaaccaggaagttcctcctgggccacctcggttccagcaagttcctacggatgccctggccaacaagttgtttggtgctcctgagccctccaccatcgcccgctctctaccaaccactgtcccagagtcaccaaactaccgcaacaccaggacccctcgcactccccggacaccacagctcaaagactcaagccagacatcacggttttacccagtggtgaaagaaggacggacactggatgccaagatgcctcgaaaaagaaagacaagacacagttcaaacccacccttggagagccatgtgggctgggtgatggattcccgtgagcacaggccccgtactgcttccatcagctccagcccctcagaagggacgcctacagttggcagctatggctgtacccctcagtcattgcccaagttccagcatccttcccatgaactgctcaaggaaaatggcttcacacaacacgtctaccataagtatcgtaggcgctgccttaatgagcggaaacgcttgggcattggccagtctcaggagatgaacacactcttccgcttctggtccttcttcctccgagatcacttcaacaaaaagatgtatgaggagttcaagcagctggctctggaggacgccaaagaaggctacagatatggtttggagtgcctttttcgatactacagttatggcctggaaaagaagttccggctggacatattcaaggattttcaggaggaaacggtgaaggactatgaagctggccaactgtatgggctggagaagttctgggccttcttgaaatattccaaagccaaaaatttggacattgaccccaaactgcaagaatacctcggcaaattccgacgtcttgaagacttccgagtagatccccccatgggtgaggagggcaaccacaagcgacactcagtggtagcaggaggtggcggcggtgagggcaggaagcggtgcccctcccagtcttccagcaggcctgctgccatgatcagccaaccccctacaccacccaccggccagcctgtccgggaagatgccaaatggacaagccagcactcgaacacacagactttgggaaagtgaaaagctccttagccctggggcttgaggggggaaaggggtagggtgggtaagagtccatgggggtgcccagtcccaggagaggggacaatgaagggacaggcctggagttactaggacaggcctttgtgctgagtagcaatgtatacaccatttgggctatcagaggtacccctgggcaggagcctctacatccccttccccctcctctctccatgactcttgacatcctagcttcttctaaggggggagggaaaggggggagatttttatatatatatacatatatatatatcaagttttaaattattgatagttcatctggattaccaaaatcactctgcagccctgcccgaggctagtaggctgcaaccctggtccccacccctaacctcctgctccccctcaagccaactatgcagcccacaagaaggccctgcgggcccccccattgcccagcactgtctcatagaaggctctggtggtacctctgggccccaggagcatcagccccttgatcatctggggtttgtcatcaccatattttctccctgctgttcccaccatgcccttctgccatcttctgggagaaggaaaccaaaggatctaaaactggggtttgggggaaggtttcagcctctccccactccccttgccccacaccctttactccccagcccagagagacgctgcttttaccaggaaagactattgaaagatgttttattttatttttctctgacctttccatccttgaaaaaatggggaaaaaagaagaaaaaagacaaaatcgaccataaaagaccaaaaaaaaaaaaaaaatcagaaaacccccacctaatccacagaaagtaatgtctttcccctccccttggaatttttgttttgtttttggaaataatatttttttaaaagttgccttattgtggagcgggaatctgaaatacccaaatgcctgttttcctcggtggagtcaacccgaagagctcccaccttctctggatgtgcctgggcttggactggctagaatctttctctggactgttgcatgtacagtgcctccatcctggaggcaagagagttgggagtggctcgaatcagagccgtgcccaagatatccctgctgttgcatcgtttgaagctgacgtcctgtgtctgtacactgctgccactgttgtgtcctcgctctgcttgctgttgcctcacgccaggccccgtcctgccgtgacacccttcatcctacccttggaaccccaaggccaagttggttcaaactgttggagaacagagttggcctgcatctggaacacacttgtcctcagcttaccatctcctcacaccccagagtggaaaggtgaacacctgcagctgaggcttggaaacgtttcttgtgttgccctgaaaaatctttgagacctcagggaggctctgtctctcttaaaaggtggagaaagatgccattctctccctaaggtctggtggagtctccccatcttgcatacccttctgcaagccatctatctctgctcactctccaattgacccgcctgggaacaagggatgaggaggagttgggggctggggggaatcctgccagttggtgaagccctgtggcaggaaggtatatgtggacatagagtatacctgattctctttcttcagccactgactgcttgggttgggctgtgaatgataatggaatggctggagtctgctgttgtcagaaggcagggagggtgatgaaggactgacccacatggactgggatgtgtgtcggttatgggcatgactgcacgttcactctcagtgggatctgggcaacatggagttcattgtcctgttgcttacttactgcaatgtctttggccctccttttcaactggttcctctgttgggcccaaaggttgggagtaggagacagtatcccaggctgacaagggcttgccctttaccttgggcaccttgttaatttttagcctgtgcccttccccacctttgccctcccagtggttggtatgtgggaagcccatctcagttcctgtgacttcatgtctcaaaccaaggatgagcgtctggtctctgctatgatggtggtatccgaggcctttccctgcccagtctggtgcctgccccacattgtaccggacactggattcctggacccccttctcctttcctttctttccttcaggtcacgcagccctgtactgtatccagcaccacagaaacctcagtgtttttcctctgctggtttggggcacaaggaagccttagggtatggggaaaggctgttattacctagagtttactcccaggccagggggctgccatcttcttcacagacatccctgaaaggaagcccctttggggcagggaggtgaggacttcatctcaacatcggctggtggttggtaggggagctttttcttttctttcctttttttttgtttttgtttttgtttttgtttttggtaacatgttaggagttaatgttgcaaagagtagtttacatcttcactttctgaagacacttgaatttaggaccgatgtatctgtgacaagcatgccagaagtggcaggggccatcagggctaaccacttcacacctaccatcgtcccatggggatccaagacctgagataaagcaacagcctgcccagatccctctgttcatcctatcccttccaaggttggtccatgccaacataacctctgggcatcagacatcagcaggtctgtgtgcctcagccctgttaaggggcaggtttctctttagccctcttcctgcacttgggagcaaaggcactaccagtagagaagggccatccagccgtgccccagcctggacccctggggctcagatagaggtgctgagcccctgtgtcaaagttgttaaatgtttttgttttgttccattgtagctctttttttttttttttcccctttcctggtgattgattttacaaaagaaagtaagctgcttagaaggccctggaagggaagtgaggaggagggacaaggaagatgactagttacggagggtgagggttgttttttgccaaaaagcctgggtagagtgatctgaattatctggcaccctcctgaatggaaccccagagtacctcctgtgtggaagggtccctggattttccctaacacccaccctctcccccttcagccatgctgatggcagagaagataagaacttggagcccatttctcactggagaggaaaacttgtcatctggctttgcggagaaggttccaccttacgctcgtagtacattatctttactatgtgctaggatatcatatttaaaaggacaaaaaaatgtaaaatacttgaatgagcttgtattataacattaatattattgagagtatctgctttccaggctgaagtgattcattcattattctagtcctgctttagtcctttgtaatttgtggtaattatgcttttctttttaatacaaaaaaatgtataaaaataaacacttgaaaaggcaaaaaaaaaaaaaaaaaaaaaaaaaaaaaaaaaaaaaaaaaaaaaaaaaaaaaaa

SEQ ID NO: 140 - DNA, 4140 bp, Homo sapiens
gtgacgcgaggtcacgtgacgggttgggcagcctgtgccgccgccgccgctttgtaagaggcacattggcagattttctattttgtacatacattattttgtatatactgtatatgatgacttcagtgagcagtgaccattgtcgaggtgctcgggaaaaaccacagatttcagcagcacaatcaacgcaaccacagaaacaagtggtacaggcaacagctgaacagatgcgtctcgctcaagtgatctttgataagaatgattcagattttgaagctaaagttaagcagcttatggaagtgacagggaaaaatcaggatgaatgcatagtggccctacatgattgtaatggagatgtgaacaaagctatcaatatattgctggaagggaattcagacacaacttcatgggagactgtagggtgtaagaaaaagaattttgcaaaagaaaattcagaaaacaaagagaatagagagaagaaaagcgagaaagaatcgagtcgtggacgtggaaacaacaaccggaaaggaagaggcggcaatcgtggcagagaatttagaggtgaagaaaatggaattgattgcaatcaagtggacaaaccttcagatcgtggcaagcgagcccggggtagagaactggcatcaaatactcacaacatagctcaggatctgtcaaacaaaagttcttatggactcaaaggggcttggaagaattctgtggaagagtggacaacagaagactggactgaagatctttctgaaacaaaggtcttcactgcctcatctgctccagcagagaatcacatcttacctgggcaaagcattgatctggtagccttgctccagaagcctgttcctcacagtcaagcctcagaagccaactcctttgaaacttcccaacagcagggctttggccaagcccttgtcttcacaaattcgcaacacaacaatcagatggcaccagggactggcagctccactgccgtcaactcctgttctcctcagagcctgtcatccgtccttggctcaggatttggagagcttgcaccaccaaaaatggcaaacatcaccagctcccagattttggaccagttgaaagctccgagtttgggccagtttaccaccaccccaagtacacagcagaatagtacaagtcaccctacaactactacttcttgggacctcaagcccccaacatcccagtcctcagtcctcagtcatcttgacttcaaatctcaacctgagccatccccagttcttagccagttgagccagcgacaacagcaccagagccaggcagtcactgttcctcctcctggtttggagtcctttccttcccaggcaaaacttcgagaatcaacacctggagacagtccctccactgtgaacaagcttttgcagcttcccagcacgaccattgaaaatatctctgtgtctgtccaccagccacagcccaaacacatcaaacttgctaagcggcggatacccccagcttctaagatcccagcttctgcagtggaaatgcctggttcagcagatgtcacaggattaaatgtgcagtttggggctctggaatttgggtcagaaccttctctctctgaatttggatcagctccaagcagtgaaaatagtaatcagattcccatcagcttgtattcgaagtctttaagtgagcctttgaatacatctttatcaatgaccagtgcagtacagaactccacatatacaacttccgtcattacctcctgcagtctgacaagctcatcactgaattctgctagtccagtagcaatgtcttcctcttatgaccagagttctgtgcataacaggatcccataccaaagccctgtgagttcatcagagtcagctccaggaaccatcatgaatggacatggtggtggtcgaagtcagcagacactagacactccaaagacaacaggccctccctctgccctcccgtctgtgagctccctgcccagcaccacctcctgcactgcacttctgccgtccacatcccagcacactggcgacctgactagcagccctctctctcagcttagcagttcgctctccagccaccagagcagcctctctgcacatgcagccctctcctcgagcacgtcacacacacatgccagtgtggagagcgcctcttcccaccagtcctcagccaccttctccacggcagcgacctccgtctcaagttccgcatcctcaggcgccagcctgtccagtagcatgaacaccgcgaacagcctctgtctgggtgggacccccgcgagtgcatccagcagcagtagcagggccgcgcccttggtgacctcaggcaaagcacccccaaacttacctcagggggtgcctcccctgctgcacaaccagtacctcgtaggtcccggaggactgcttcctgcctacccgatctatggctatgacgagctccagatgctgcagtcacggctgccagtggactactatggaattccctttgctgcacccacagcgcttgccagccgagatgggagcctagctaataatccatatccaggtgatgtcacaaagtttggccgtggggactctgcatcccctgcacccgctaccacaccagctcagccacagcagagccaatcacagacccaccacacagcccagcagcccttcgtgaatcctgcactgccacctggctatagctacactggtcttccctactacacaggcatgcccagtgccttccagtatggccccaccatgtttgtccctccagcctcagccaagcaacatggggtgaacctcagcactcccacacctcccttccagcaggccagtggttatggccagcacggctacagtacaggttatgacgacctgacccaggggacagcagcaggagactactccaaaggtggctatgctggatcatcgcaggcaccaaacaagtctgcaggttctgggcctggcaaaggagtatcagtgtcttcaagcaccactggtctacctgatatgactggttctgtctacaataagacacagacttttgacaagcagggatttcatgcagggacgcctccacctttcagcctgccctcggtcttgggctccactgggcccctggcctcgggagcggcccctggctatgcacccccaccattcctacacatcttgccagcccaccagcagccccactcacagctgctgcaccaccaccttccgcaggatgcacagagtggctcgggtcagcgcagccagcccagctccctgcagcccaagtctcaagcctccaaacctgcctacggcaactctccatactggacaaactaaacccagaagagaggggtgggctggggcaaggcttatcctgggcaggagagaacacacgagcacgtatttgggagcccagtgccctttcctagaattcccgacatgtgtcagccatgcctctgtggggagtctgcctcccagactggctactgtatgtaatgtatttatgtatgtatttgtaaatgtgatagaagtctgggggggagttgggggatggcggcagatgttagccaggtctgccctccccattcaagccccttctccactgtagcaaaataagcacccccaccccatctgccttcaggtcttcttcacagcctgcactgcccagtgggccactaggggcagtctctggaagggctggttcaaggctgtttgggtataggggtcaggtaccaatgaagaatcacgacttgtctcactcctttggaaattgttttctttcctgtgtaattacttcatacctctgtttttgagaaactgttccgtttgtcatctgtcatggtctccttccaccaaatcttcatctgggaatagcagcggtatccctccacccaagtatggccacctgtttgtcttcatatagaacaggggcttctggtctggtcatgtccctagagacttactagagactggctgaccatgaaaaaaaaaaaaataatctgagttattcagccagtcagctcccctttaaaaatctaaggtatctccaagcaacacatctccattctagttgtcttgaaccacgtgggcaactgtttcaggggttttctcttgcccaatccccacctaataaagttctgagagcatgaaaaaaaaaaaaaaa

SEQ ID NO: 141 - DNA, 8196 bp, Homo sapiens
agtggcgctgctgggacgggggaaaggagacgcttcttcctcttgctgctcttctcgttcccgagatcagcggcggcggtgaccgcgagtgggtcggcaccgtctccggctccgggtgcgaacaatgctgactgatagcggaggcggcggcacctcctttgaggaggacctggactctgtggctccgcgatccgccccagctggggcctcggagccgcctccgccgggaggggtcggtctggggatccgcaccgtgaggctctttggggaggccgggccagcgtcgggagtcggcagcagcggcggcggcggcagcggcagcggtacgggcggaggggacgcggcgctggatttcaagttggcggctgccgtgctgaggaccgggggtggaggtggtgcctctggcagtgacgaggacgaagtgtccgaggttgaatcatttattttggaccaagaagatctggataacccagtgcttaaaacaacatcagagatattcttatcaagtactgcagaaggagcagacttacgcactgtggatccagagacacaggcacgactagaagcattgctagaagcagcaggaattggcaaattgtcaactgctgatggtaaagcttttgcagatcctgaggtactccggagactgacatcctcagttagttgtgcactggatgaagctgctgctgcactgacacggatgaaagcagaaaacagccacaatgcaggacaagtggacactcgcagtctagcagaagcttgttcagatggggatgttaatgctgttcgtaaattgctagatgaaggcagaagtgtaaatgaacatacagaagaaggagaaagcctgctgtgtttggcttgttcagcagggtattatgaattagcacaagtattgcttgctatgcatgctaatgttgaagatcgagggaataaaggagacataactcccctgatggcagcttccagtggaggttacttagatattgtgaaattattacttcttcatgatgctgatgtcaactcccagtctgcaacaggaaacactgcgctaacttatgcatgtgctggaggatttgttgacattgttaaagtgctccttaatgaaggtgcaaatatagaagatcataatgaaaatggacatactcccttaatggaagcagccagtgcaggtcatgtggaagttgcaagagttcttttagatcatggtgcaggcatcaacactcattctaatgaattcaaagaaagtgctctaacacttgcttgctacaaaggccatttggatatggttcgctttctacttgaagctggtgcagatcaagagcacaaaacagatgagatgcacactgccttaatggaggcctgcatggatggacatgtagaggtggcacgtttgcttttggatagtggtgctcaagtgaacatgcctgcagattcatttgaatctccattgacgctagctgcctgtggaggacatgttgaattggcagctctacttattgaaaggggagcaaatcttgaagaagttaatgatgaaggatacactcccttgatggaagctgcccgggaaggacatgaagaaatggtggcactactcttagcacaaggagcaaatataaatgcccagacagaagaaactcaagaaactgctcttactttggcttgctgtggaggattttctgaagttgcagactttcttattaaggcaggggctgatatagaacttggctgctccacacctctgatggaggcatctcaggagggacacctggaattggttaaatatttgctggcttctggcgctaatgtgcatgctacaacagcaacaggagacacagccttaacctatgcttgtgaaaatggacatacggatgttgcagatgttttacttcaagcaggggctgatttagaacatgaatctgaaggtggaagaacacctttgatgaaagctgcaagagctggtcatttgtgcactgtgcagtttcttattagcaaaggtgccaatgttaacagggctacagccaataatgatcatacagtagtgtcgctggcatgtgcaggaggccacctggcagttgttgagcttctcttggctcatggggctgaccctactcatcgactcaaggatggttcaacaatgctcattgaagctgcaaagggtggccatactaatgtagtttcttatctgttggattatccaaataatgttctgtcagttcccaccacagatgtgtctcagctccctccaccttctcaagatcagtctcaggtgccacgtgtgccaacgcatacacttgccatggttgtacctccccaggaacctgacagaacttcacaggagaactctcctgcccttttaggagtgcaaaaaggtacatccaagcagaagtccagttccctccaggtagcagatcaggacctactgccatcttttcacccataccagcctttggagtgcatagtagaggagactgaaggcaagctgaatgaactgggacaaagaattagtgctattgaaaaagcacagcttaagtcactggagttaattcaaggtgaacctctgaacaaagataagatagaagaacttaaaaagaacagagaagagcaagtccagaagaagaagaaaatattgaaagaactgcagaaagtggaaaggcagttgcagatgaaaacacagcagcaatttaccaaagaatacttggaaaccaaaggtcagaaagacacagtgtctctacaccaacagtgctctcatagaggagtcttcccagaaggggaaggagatggtagtctcccagaggatcacttttcagagttacctcaggttgacacaatcttatttaaagataatgatgttgatgatgagcaacagtctccaccatcggcagaacagattgattttgtcccagtccagcctttatcatctccacagtgtaacttttccagtgacttaggttctaatgggacaaattctcttgaacttcagaaagtatcaggtaatcagcagattgtaggacagcctcagattgctattactggacatgatcaggggctgttagttcaagaaccagatggactaatggttgcaactccagctcagacgcttaccgacactcttgatgacctgatagcagctgtgagtaccagagtgcccactggttccaacagttcttctcagaccacagagtgtcttacacctgaatcctgttcgcagactacaagcaatgtggcttcccaatcgatgcctcctgtgtatccttcagttgacattgatgcacatactgagagcaatcatgacacagcattaacactagcttgtgcaggtggtcatgaagaacttgtatctgtgctcattgcacgggatgccaaaattgaacacagagacaaaaaaggtttcacaccactaatcctggcagcaacagcagggcatgttggagttgttgaaatccttttggataaaggtggagatatagaagcacagtctgaacgaactaaggatactccgctttcattggcatgttctggtggacgtcaggaggtggtagacttgctgctggctcgaggtgcaaataaagaacataggaacgtatctgattatacaccactgagtctagctgcgtctggaggatatgttaatatcattaagattctgcttaatgctggggcagaaattaattcaaggactgggagtaaactaggtatttctcccctgatgttggctgcaatgaatggacatgttcctgcagtaaaattgctgctcgatatgggttcagacattaatgcccaaatagagaccaatcggaacacggctctcaccctggcctgtttccagggccgagcagaagtagtgagtttgcttctggaccgaaaagccaatgttgaacatagggcaaagacgggtcttacccccttgatggaagcagcttctggagggtatgcagaggttggaagagttcttcttgataaaggagcagatgttaatgctccccctgtgccttcctcaagagatactgctttaacaatagcagcagacaaaggtcactacaaattttgtgaactcctgattcataggggagcccacattgatgttcgtaacaaaaagggaaatacgccactttggctggcatccaatggaggtcattttgatgttgtgcagttgctagtgcaagcaggtgctgatgtggatgcagcagataaccggaaaatcacacctcttatgtcagcatttcgcaagggtcatgtaaaagttgttcaatatttggtaaaggaagtaaatcagttcccttctgatatagaatgcatgagatacatagcaacaattacagataaggaactgttgaaaaaatgtcatcaatgtgtcgaaaccattgtgaaggctaaagaccagcaagctgcagaagcaaataagaatgcgagtattcttttaaaggaacttgatctggaaaagtcaagagaagagagcagaaagcaggctcttgctgctaaaagagaaaaaagaaaagaaaagagaaaaaagaaaaaagaggaacagaaaaggaaacaggaagaagatgaagaaaacaaacctaaggagaattcggaactaccagaggatgaagatgaagaggagaatgatgaagatgtggagcaagaagttcccatagaacctcctagtgcaaccaccaccactacgattggaatctctgcaacatctgcaacattcacaaatgtgtttgggaaaaaaagggccaatgtggtgacaactcccagcaccaatcggaaaaataagaagaacaaaacaaaagaaacccctcctacagcacatttaattttaccagaacaacatatgtctttagcccaacaaaaggcagataaaaataaaataaatggagaacctagaggtggtggtgcaggtgggaatagtgattcagataacttggacagcacagactgcaacagtgagagtagcagtggtggtaaaagccaagagttaaattttgtgatggatgtgaattcctctaaatacccctcactgctccttcattcccaagaagaaaagacaagtactgctacttccaaaactcagacacgacttgaaggtgaagtgactcctaattccttgtcaaccagctacaagacagtgtcattgccattaagctctccaaacataaagctgaatctcactagccctaaaaggggtcagaaaagagaagaagggtggaaagaagttgtacgaaggtcaaagaaattgtctgttccagcctcagtggtgtcgaggataatgggaagaggaggatgcaacatcactgcaatacaggatgttactggtgcccatattgatgtggataaacaaaaagataagaatggcgagagaatgatcacaataaggggtggcacagaatcaacaagatatgcagttcaactaatcaatgcactcattcaagatcctgctaaggaactggaagacttgattcctaaaaatcatatcagaacacctgccagcaccaaatcaattcatgctaacttctcatctggagtaggtaccacagcagcttccagtaaaaatgcatttcctttgggtgctccaactcttgtaacttcacaggcaacaacgttatctacgttccagcccgctaataaacttaataagaatgttccaacaaatgtacgttcttctttcccagtttctctacccttagcttatcctcaccctcattttgccctgctggctgctcaaactatgcaacagattcggcatcctcgcttacccatggcccagtttggaggaaccttctcaccttctcctaacacatggggaccattcccagtgagacctgtgaatcctggcaacacaaatagctctccaaagcataataacacaagccgtctacctaaccagaacgggactgttttaccctcagagtctgctggactagctactgccagttgtcctatcactgtctcttctgtagttgctgccagtcagcaactgtgtgtcactaatacccggactccttcatcagtcagaaagcagttgtttgcctgtgtgcctaagacaagtcctccagcaacagtgatttcttctgtgacaagcacttgtagttccctgccttctgtctcctctgcacctatcactagcgggcaagctcccaccacatttctacctgcaagtacttctcaagcacagctttcttcacaaaagatggagtctttctctgctgtgccacccaccaaagagaaagtgtccacacaggaccagcccatggcaaacctatgtaccccatcttcaactgcaaacagttgcagtagctctgccagcaacaccccgggagctccagaaactcacccatccagtagtcccactcctacttccagtaacacacaagaggaggcacagccatccagtgtgtctgatttaagtcctatgtcaatgccttttgcatctaactcagaacctgctccattgactttgacatcacccagaatggttgctgctgataatcaggacaccagtaatttacctcagttagctgtaccagcacctcgagtttctcatcgaatgcagcccagaggttctttttactccatggtaccaaatgcaactattcaccaggatccccagtctatttttgttacgaatccagttactttaacaccacctcaaggcccaccagctgcagtgcagctttcttcagctgtgaacattatgaatggttctcagatgcacataaacccagcaaataagtctttgccacctacatttggcccagccacacttttcaatcacttcagcagtctttttgatagtagtcaggtgccagctaaccagggctggggagatggtccactgtcctcacgagttgctacagatgcctctttcactgttcagtcagcgttcctgggtaactcagtgcttggacacttggaaaacatgcaccctgataactcaaaggcacctggcttcagaccaccttcccagcgagtttctactagtccagttgggttaccatccattgacccatcaggcagctccccatcttcctcttctgctcctctggcaagtttttccggcataccaggaacaagggttttcctgcaagggccagctcctgttgggactcctagtttcaacagacaacatttttctccccatccttggacaagcgcctcaaactcatccacttctgccccaccaacgttgggccaaccaaaaggagtcagtgccagtcaagatcgaaagatacctcccccaattggaacagagagactggcccgaattcggcaaggagggtctgttgcacaagccccggcggggaccagttttgtcgctcccgttggacacagtggaatctggtcatttggtgtcaatgctgtgtcagaaggcttatcaggttggtcgcaatctgtgatggggaaccatccaatgcatcaacaattatcagacccaagcacattctcccaacatcagccaatggagagagatgattctggaatggtagccccctctaacatttttcatcagcctatggcaagtggttttgtggatttttctaaaggtctgccaatttccatgtatggaggcaccataataccctctcatcctcagcttgctgatgttccaggaggccctctgtttaatggacttcacaatccagatcctgcttggaaccctatgataaaagttatccaaaattcaactgaatgcactgatgcccagcagatttggcctggcacgtgggcacctcatattggaaacatgcatctcaaatatgtcaactaagttagaaggtctttactctttagccttgtttaagaaacctatgaccttggaagaaccatggggatttttttttaatgtgcctaagaaattttctctgaggctttagcaatggaaatttgattgcccattgtataagaacaaattgatttcctatccacctgattatgttctctggttagtttagccattttgaacttaagatcatatgaccttagtgcttttggctaaacatacagaatactacttgtatgcagaagagaattagttgattacatgtttcaaccttttagggtgataaatacatgtataattgtttacatacttaaaaggaaaaagttgagtaaatttcttgtcatatagtggctctacgtaatgtagcctgtattaatgtgaaatatttaccagaatattcaataaaaagatgaacagtctttagaaaaaaa

SEQ ID NO: 142 - DNA, 2446 bp, Homo sapiens
ctgaggcgcggcggccccgtggagcagcgcagtatggcgggcggggcccgggaggtgctcacactgcagttgggacattttgccggtttcgtgggcgcgcactggtggaaccagcaggatgctgcgctgggccgagcgaccgattccaaggagcccccgggagagctgtgccccgacgtcctgtatcgtacgggccggacgctgcacggccaggagacctacacgccgcgactcatcctcatggatctgaagggtagtttgagctccctaaaagaggaaggtggactctacagggacaaacagttggatgctgcaatagcatggcaggggaagctcaccacacacaaagaggaactctatcccaagaacccttatctccaagactttctgagtgcagagggagtgctgagtagtgatggtgtctggagggtcaaatccattcccaatggcaaaggttcctcaccactccccaccgctacaactccaaaaccacttatccctacagaggccagcatcagggtctggtcagacttcctcagagtccatctccatccccggagcatctgtatgattcagaagtacaaccacgatggggaagcaggtcggctggaggcttttggccaaggggaaagtgtcctaaaggaacccaagtaccaggaagagctggaggacaggctgcatttctacgtggaggaatgtgactacttgcagggcttccagatcctgtgtgacctgcacgatggcttctctggggtaggcgcgaaggcggcagagctgctacaagatgaatattcagggcggggaataataacctggggcctgctacctggtccctaccatcgtggggaggcccagagaaacatctatcgtctattaaacacagcttttggtctcgtgcacctgactgctcacagctctcttgtctgccccttgtccttgggtgggagcctgggcctgcgacccgagccacctgtcagcttcccttacctgcattatgatgccactctgcccttccactgcagtgccatcctggctacagccctggacacagtcactgttccttatcgcctgtgttcctctccagtttccatggttcatctggctgacatgctgagcttctgtgggaaaaaggtggtgacagcaggagcaatcatccctttccccttggctccaggccagtcccttcctgattccctgatgcagtttggaggagccaccccatggaccccactgtctgcatgtggggagccttctggaacacgttgctttgcccagtcagtggtgctgaggggtatagacagagcatgccacacaagccagctcaccccagggacacctccaccctctgcccttcatgcatgtaccactggggaagaaatcttggctcagtatttacaacagcagcagcctggagtcatgagttcttcccatctgctgctgactccctgcagggtggctcctccttacccccacctcttctcaagctgcagtccaccgggtatggttctggatggttcccccaagggagcagcagtggagagcatcccagtgtttggggcactgtgttcctcttcgtccctgcaccagaccctggaagccttggccagagacctcaccaaactcgacttgcggcgctgggccagcttcatggatgctggagtggagcacgatgacgtagcagagctgctgcaggagctacaaagcctggcccagtgctaccagggtggtgacagcctcgtggactaaagttcccagtgtgggagaaaggagctagtttgcaataaaaacagctggatgcaggagcccagtgtcttcatgcagaggagctcaatgtcgcgggactagctacaccaacatatgcactttttacatttagaaacactgtgattagaccacagaacaataaatatgtgccatcagaccaaaaaaaagtagagaaaggagctgaactccactctcgatgctacttacagaggacatctgtaaagtcttcataaaagaccttgaatgatgcctaggatggcagagcccctgggtcctactccatcctccagcctttgtccttgtcctggcctcctgctctccagatctgtaaactgggctcaaggactgtacaagcagagtacaactacccgcctccccggtgccagggcgcctgttgggtttggtcctgtgtagatgattcccagagtctcattcatccagctcctcttcagacagaaggtccccatggtcagacagctggtctgcattgctggtactggttgcatcatcctcatcctcagagctggcttcacaggcagtgtggaagagctgcatgagttctcgaaaatggtgggaaacctaagaaaggaggagggctgtattcactgatccttagtaacatgttaacatttatgaagcactatatattgatttgcaaaatcttttgtttattccaaaaaaa

SEQ ID NO: 143 - DNA, 3071 bp, Homo sapiens; identical to SEQ ID NO: 97

SEQ ID NO: 144 - DNA, 4355 bp, Homo sapiens
aaggcgctcgtttggcgcgcgcgccctaggcggcggatctaagctaacttcttggatcttttcttgtttctccttggtttttgactttttctggaccctggtgtctacgatttccgagatgccgtcttctttgttgggcgcggcgatgccggcctctacatctgccgcagccctgcaggaagctctggaaaatgctggacggctcatcgaccgtcagttgcaagaggaccgcatgtacccggacctttccgagctgcttatggtgtctgccccaaataatcccaccgtttctggcatgtcagatatggattatcctttacaaggacctggtttgctgtccgtacccaaccttccagagatcagttccatccgaagagttcctctcccacctgaacttgttgagcagtttggacatatgcagtgtaattgcatgatgggtgtgttccctcctatcagcagagcttggctcacaattgacagtgatatattcatgtggaactatgaggatggaggagaccttgcctattttgatggacttagtgagactattcttgctgtggggcttgtgaagccaaaagcaggcatctttcaacctcatgtgcgacacctcctggttttggcgacccctgtagacatagtaattcttggactcagctatgctaatttgcaaacaggttctggagttcttaatgatagtttgtctggtggaatgcagttgcttccagatcctttatattctcttcctactgataatacttaccttttaacaataacttccactgataatggcagaattttcttggctggaaaggatggctgtttatatgaagtagcctaccaggctgaagcagggtggtttagccaaagatgtaggaaaataaaccactcaaagagctcactttctttccttgttccttccttgctacaattcacgttctcagaagatgatcctattcttcaaattgcaattgataattctagaaatattttatatacacgatctgagaaaggagtaatacaggtgtatgatttgggacaagatggacaaggaatgagcagagttgcctctgtgtcacagaatgccattgtctctgctgctggtaacattgctaggaccatcgatcgttctgtttttaaaccaattgtccaaatagcagtgattgaaaattctgaatcactggactgtcagttattggctgtcacacatgcaggtgttaggttatattttagcacttgtccattcagacagccattagcacggcctaatacactgacgctggttcatgtccgcttacctcctggattctcagcatcttcaaccgtggaaaagccttcaaaagtacatagagctctttatagtaaaggtattctattgatggcagcctcagaaaatgaggataatgatattttatggtgtgtcaaccatgatacttttcctttccaaaagccaatgatggaaacccagatgacagctggtgttgatggtcattcctgggctctttctgcgatagatgaattgaaagtagataaaataattacacctttaaacaaggatcatattccaataactgattcaccagttgttgtacagcagcacatgttacctccgaagaaatttgttctcctctcagcacaggggagccttatgtttcataaacttagacctgtagatcaactgaggcatctacttgtgagtaatgtgggaggagatggagaagagattgaaagattctttaaattacatcaggaagaccaggcttgtgcaacttgccttattcttgcttgctccactgctgcctgtgatagagaagtatctgcctgggctactcgggctttctttaggtatggtggtgaagcacagatgagatttccaaccactcttccgcctccaagtaatgttggtcccatcttggggtctcctgtctattctagttctcctgttcctagtggtagtccctatccaaatccatcctttttgggaacaccgtctcatggtatacagcctcctgccatgtcaactccagtgtgtgctctgggaaacccagcaactcaggccacaaatatgagttgtgtgactggaccagagattgtgtactctggaaaacacaatggtatttgcatttacttttctcggatcatgggaaacatttgggatgcaagcttagttgtggagagaatattcaagagtggcaacagagagatcactgcaattgaaagtagtgttccctgccaactgctagagtcagtgctacaagaactaaagggtttgcaggaatttctagacagaaactcccagtttgcaggaggaccattaggaaatccaaatactactgctaaagtgcagcagaggctgataggattcatgcgtcctgaaaacggaaatccccagcaaatgcaacaggaactgcagaggaagtttcatgaggctcaactaagtgaaaagatttcacttcaggcaattcagcagttggttcgaaaatcatatcaggctctggctttatggaaacttctttgtgaacatcaattcactatcattgtggcagaacttcagaaggaacttcaagagcagctgaagatcaccacctttaaagatcttgtaatcagggacaaagaactcacaggggcattaattgcttctcttatcaactgctacatcagagataatgccgctgttgatggcattagtttacatttacaggatatctgcccacttctatatagcactgatgatgcaatttgttctaaggcaaatgagcttctccagcgttcccgacaagttcaaaataagactgaaaaagaaagaatgttaagggaatcattaaaggaatatcaaaaaattagcaatcaagtggacctttccaatgtttgtgctcagtatagacaagtgagattttatgagggtgtggtggaactttctcttacggctgcagagaaaaaagatcctcaaggtcttgggcttcatttctataaacatggagaaccagaagaagacatagttggacttcaggccttccaagaaagattaaacagttacaaatgcattacagacacacttcaagaactggtaaatcaaagtaaggccgctcctcagtctcccagtgtacccaaaaaacctggtcctccagtgttgtcatctgatccaaatatgctgagtaatgaagaagcaggacatcattttgaacaaatgcttaaattgtcacagcgatccaaggatgagctctttagtattgccctttataattggctaatacaagtcgaccttgcagataagctgctacaggttgcttctccatttctggagccacatctagtccgaatggccaaagttgatcaaaacagagttcgttatatggatttactctggcggtattacgagaagaacagaagtttcagtaatgctgctcgtgtactgtccagactggctgacatgcatagcacagaaatttcacttcagcagcgactagagtacattgctcgagccattcttagtgccaaaagttccactgccatttcatcaatagctgccgatggtgaatttcttcatgaattagaagaaaaaatggaggttgctaggatccaacttcagatacaggagacactacaaaggcagtattcccatcattcttctgtacaggatgcagtttctcagctggattctgagctgatggacataactaagctttatggggaatttgctgacccatttaaacttgcagagtgcaaacttgcaataattcattgtgccggttattcagaccctatattggtgcagacactttggcaagatatcatagagaaagaattgagtgacagtgtgacattgagctcctcggatagaatgcatgctcttagtctcaagattgttctccttggcaaaatttatgctggcacaccacgcttctttcctttagattttattgtacagtttttagaacagcaggtttgtactttgaactgggatgtgggcttcgtaatacagacaatgaatgaaattggagtaccattacctagactactagaagtttatgatcagttgttcaaatcacgggatccattctggaacagaatgaagaagccactgcaccttttggattgtatacatgtattattgataagatatgttgagaatcccagccaagttttaaattgtgaaaggagaagatttacaaatctctgcctggatgctgtttgtggttaccttgttgagctccagtctatgagctcgtcagtagcagtacaagccatcactgggaattttaaatctcttcaagctaaattagaacggcttcattaattactgtgatatactttcatccgttttatgatctgtaaaataaaaactcagctgggtccag

SEQ ID NO: 145 - DNA, 3404 bp, Homo sapiens
gtgccggggtgcggcggcggcagcggcggccagcagggcggaggctgaggcagcaagctcgctagagagggagaagcagtcgggcgcaggcgcctcctccgcagcccgctccatggtcggcgcccacagcccgcggcggcctgtcttgcgctccacttccttcacatcctcctccgcctcctcgttttcaggcgccgccggcggcgctgtgtggaggcccgcgagctgaaattcgcggtgcgacgggagggagtggagaaggaggtgagggggcccaggatcgcggggcgccctgaggcaaggggacgccggcgggccgaagcgcagcccgccgcccgcaggctcggctccgccactgccgccctcccggtctcctcgcctcggccgccgaggcagggagagaatgagccccgggacccgccgggggacggcccgggccaggcccgggatctagacggccgtagggggaagggagccgccctccccacggcgccttttcggaactgccgtggactcgaggacgctggtcgccggcctcctagggctgtgctgttttgttttgaccctcgcattgtgcagaattaaagtgcagtaaaatgtccactaggaccccattgccaacggtgaatgaacgagacactgaaaaccacacgtcacatggagatgggcgtcaagaagttacctctcgtaccagccgctcaggagctcggtgtagaaactctatagcctcctgtgcagatgaacaacctcacatcggaaactacagactgttgaaaacaatcggcaaggggaattttgcaaaagtaaaattggcaagacatatccttacaggcagagaggttgcaataaaaataattgacaaaactcagttgaatccaacaagtctacaaaagctcttcagagaagtaagaataatgaagattttaaatcatcccaatatagtgaagttattcgaagtcattgaaactgaaaaaacactctacctaatcatggaatatgcaagtggaggtgaagtatttgactatttggttgcacatggcaggatgaaggaaaaagaagcaagatctaaatttagacagattgtgtctgcagttcaatactgccatcagaaacggatcgtacatcgagacctcaaggctgaaaatctattgttagatgccgatatgaacattaaaatagcagatttcggttttagcaatgaatttactgttggcggtaaactcgacacgttttgtggcagtcctccatacgcagcacctgagctcttccagggcaagaaatatgacgggccagaagtggatgtgtggagtctgggggtcattttatacacactagtcagtggctcacttccctttgatgggcaaaacctaaaggaactgagagagagagtattaagagggaaatacagaattcccttctacatgtctacagactgtgaaaaccttctcaaacgtttcctggtgctaaatccaattaaacgcggcactctagagcaaatcatgaaggacaggtggatcaatgcagggcatgaagaagatgaactcaaaccatttgttgaaccagagctagacatctcagaccaaaaaagaatagatattatggtgggaatgggatattcacaagaagaaattcaagaatctcttagtaagatgaaatacgatgaaatcacagctacatatttgttattggggagaaaatcttcagagctggatgctagtgattccagttctagcagcaatctttcacttgctaaggttaggccgagcagtgatctcaacaacagtactggccagtctcctcaccacaaagtgcagagaagtgttttttcaagccaaaagcaaagacgctacagtgaccatgctggaccagctattccttctgttgtggcgtatccgaaaaggagtcagaccagcactgcagatagtgacctcaaagaagatggaatttcctcccggaaatcaagtggcagtgctgttggaggaaagggaattgctccagccagtcccatgcttgggaatgcaagtaatcctaataaggcggatattcctgaacgcaagaaaagctccactgtccctagtagtaacacagcatctggtggaatgacacgacgaaatacttatgtttgcagtgagagaactacagctgatagacactcagtgattcagaatggcaaagaaaacagcactattcctgatcagagaactccagttgcttcaacacacagtatcagtagtgcagccaccccagatcgaatccgcttcccaagaggcactgccagtcgtagcactttccacggccagccccgggaacggcgaaccgcaacatataatggccctcctgcctctcccagcctgtcccatgaagccacaccattgtcccagactcgaagccgaggctccactaatctctttagtaaattaacttcaaaactcacaaggagtcgcaatgtatctgctgagcaaaaagatgaaaacaaagaagcaaagcctcgatccctacgcttcacctggagcatgaaaaccactagttcaatggatcccggggacatgatgcgggaaatccgcaaagtgttggacgccaataactgcgactatgagcagagggagcgcttcttgctcttctgcgtccacggagatgggcacgcggagaacctcgtgcagtgggaaatggaagtgtgcaagctgccaagactgtctctgaacggggtccggtttaagcggatatcggggacatccatagccttcaaaaatattgcttccaaaattgccaatgagctaaagctgtaacccagtgattatgatgtaaattaagtagcaattaaagtgttttcctgaacactgatggaaatgtatagaataatatttaggcaataacgtctgcatcttctaaatcatgaaattaaagtctgaggacgagagcacgcctgggagcgaaagctggccttttttctacgaatgcactacattaaagatgtgcaacctatgcgccccctgccctacttccgttaccctgagagtcggtgtgtggccccatctccatgtgcctcccgtctgggtgggtgtgagagtggacggtatgtgtgtgaagtggtgtatatggaagcatctccctacactggcagccagtcattactagtacctctgcgggagatcatccggtgctaaaacattacagttgccaaggaggaaaatactgaatgactgctaagaattaaccttaagaccagttcatagttaatacaggtttacagttcatgcctgtggttttgtgtttgttgttttgtgtttttttagtgcaaaaggtttaaatttatagttgtgaacattgcttgtgtgtgtttttctaagtagattcacaagataattaaaaattcactttttctcagtaaaaaaaaaaaaaaaaaa

SEQ ID NO: 146 - DNA, 1488 bp, Homo sapiens
gcggggccgcgggccgggggcggactggggcgggcggaaggagagccaggccggaaggaggctgccggagggcgggaggcaggagcgggccaggagctgctgggctggagcggcggcgccgccatgtccgacagcgagaagctcaacctggactcgatcatcgggcgcctgctggaagtgcagggctcgcggcctggcaagaatgtacagctgacagagaacgagatccgcggtctgtgcctgaaatcccgggagatttttctgagccagcccattcttctggagctggaggcacccctcaagatctgcggtgacatacacggccagtactacgaccttctgcgactatttgagtatggcggtttccctcccgagagcaactacctctttctgggggactatgtggacaggggcaagcagtccttggagaccatctgcctgctgctggcctataagatcaagtaccccgagaacttcttcctgctccgtgggaaccacgagtgtgccagcatcaaccgcatctatggtttctacgatgagtgcaagagacgctacaacatcaaactgtggaaaaccttcactgactgcttcaactgcctgcccatcgcggccatagtggacgaaaagatcttctgctgccacggaggcctgtccccggacctgcagtctatggagcagattcggcggatcatgcggcccacagatgtgcctgaccagggcctgctgtgtgacctgctgtggtctgaccctgacaaggacgtgcagggctggggcgagaacgaccgtggcgtctcttttacctttggagccgaggtggtggccaagttcctccacaagcacgacttggacctcatctgccgagcacaccaggtggtagaagacggctacgagttctttgccaagcggcagctggtgacacttttctcagctcccaactactgtggcgagtttgacaatgctggcgccatgatgagtgtggacgagaccctcatgtgctctttccagatcctcaagcccgccgacaagaacaaggggaagtacgggcagttcagtggcctgaaccctggaggccgacccatcaccccaccccgcaattccgccaaagccaagaaatagcccccgcacaccaccctgtgccccagatgatggattgattgtacagaaatcatgctgccatgctgggggggggtcaccccgacccctcaggcccacctgtcacggggaacatggagccttggtgtatttttcttttctttttttaatgaatcaatagcagcgtccagtcccccagggctgcttcctgcctgcacctgcggtgactgtgagcaggatcctggggccgaggctgcagctcagggcaacggcaggccaggtcgtgggtctccagccgtgcttggcctcagggctggcagccggatcctggggcaacccatctggtctcttgaataaaggtcaaagctggattctcgcaaaaaaaaaaaaaaaaaa

SEQ ID NO: 147 - DNA, 2975 bp, Homo sapiens
gagacgccgagcgggccgagtgcggccgagcaaagccggagccggagcggggccgcaggagacgggccgggtccggacgggccgagatgccctataaactgaaaaaggagaaggagccccccaaggttgccaaatgcacagccaagcctagcagctcgggcaaggatggtggaggcgagaacactgaggaggcccagccgcagccccagccccagccccagccccaagcccagtctcagccaccgtcatccaacaagcgtcccagcaatagcacgccgccccccacgcagctcagcaaaatcaagtactcaggggggccccagattgtcaagaaggagcgacggcaaagctcctcccgcttcaacctcagcaagaatcgggagctgcagaagcttcctgccctgaaagattcgccaacccaggagcgggaggagctgtttatccagaagctacgccagtgctgtgtcctctttgacttcgtgtcagacccactcagtgacctcaaattcaaggaggtgaagcgggcaggactcaacgagatggtggagtacatcacccatagccgtgatgttgtcactgaggccatttaccctgaggctgtcaccatgttttcagtgaacctcttccggacgctgccaccttcatcgaatcccacaggggctgagtttgacccagaggaagatgagcccaccctggaagctgcttggccacatctccagctcgtgtatgagttcttcttacgtttccttgagtctcctgatttccagccaaacatagccaagaagtacatcgaccagaagtttgtacttgctctcctagacctatttgacagtgaggatcctcgagagcgggacttcctcaagaccattttgcatcgcatctatggcaagtttttggggctccgggcttatatccgtaggcagatcaaccacatcttctacaggttcatctacgagacggagcatcacaacgggattgctgagctcctggagatcctgggcagcatcatcaatggctttgccctgccccttaaagaagagcacaagatgttcctcatccgtgtcctacttccccttcacaaggtcaagtccctgagtgtctaccaccctcagctggcatactgtgtggtacaattcctggagaaggagagcagtctgactgagccggtaattgtgggacttctcaagttttggcccaagacccacagccccaaggaggtgatgttcttgaatgagctggaggagattctggacgtcattgaaccttctgagttcagcaaagtgatggaacccctcttccgccagctggccaagtgtgtctctagcccccatttccaggtggcagagcgtgctctctattactggaacaatgagtacatcatgagcctgataagtgacaatgctgcccgagtcctccccatcatgttccctgcactctacaggaactccaagagccactggaacaagacaatccatggactgatctataatgccctgaagttgtttatggaaatgaatcagaagctgtttgatgactgcacacaacaatacaaggcagagaagcagaagggccggttccgaatgaaggaaagggaagagatgtggcaaaaaatcgaggagctggcccggcttaatccccagtatcccatgttccgagcccctccaccactgccccctgtgtactcgatggagacagagacccccacagctgaggacatccagcttctgaagaggactgtggagactgaggctgttcagatgctaaaagacatcaagaaggagaaagtgctgctgcggaggaagtcggagctgccccaggacgtgtacaccatcaaggcactggaggcgcacaagcgggcggaagagttcctaactgccagccaggaggctctctgacccctcacgttcctaccacagggccacagcccacacagccctgggacactgccctggccctccatactctgctccctactggctgtcttgggggaaggcagcgcctctctagctactcaagggagggggatgtgggcacttgaagcagggacacccacagaatggtccctcttctccccaaaaggtgttcatgcctccctgtggctagtacaggctgagcactaagatgcttagtgctcagacaacctggggatgcctgtcccctacctgctcctcacccacagctacctgaggctgctctgagaagtacacacaggaatacatacgctcctctattcttcccttcatcctcatttgaacgccaggtatctcccctcctctctctcccctgcagaggcatgtagggaacagcaggagattattctcaccaaagttatgtcaagccccattggtcccagagtagctgaagggaagccaacccccctgcagcacaaataggccccccagtcccagccgtgtgctggcagatagggttgtattatttcttcttaccccatgcctgaccaagggaggtcaaaaggagaaaagtataggctgtggacaataactgatgaatatagggcccagatggaccaagtggggccggggagggatgaataaacaccctaccccgtgccctgtctttggtgagcagcagccctggggtcacagacatggaagggaccaccctggggctgactgcttttctgtgctgttggttcccaaaactagaaagaaggaagcagggagcggtgccccaagcatggctcctgccaacacctatttatttccttgtttgtgctatgctgggcaggccttctcttgtcccttataggtaccttggaggggccaggggctgaggaaggccggacccaggttccaggggcgcaggcagtgcggcttttggctgtgtacatagggtgctttattctccacagagtgatacatgctaaggtgggttgggcttggaccgatgtccccatatgtacagaactgaataaagtgggtctctgagaaaaaaaaaaaaaaaaaaaaaaaaaa

SEQ ID NO: 148 - DNA, 4650 bp, Homo sapiens
cccagggcccggcaggaggagccttggtggcgagaaaggaaatccaggctcccctttccttaaagccactgcagcagctgggaaggcgcccacagagcgggcgcgccaagcgggacgcgggagtcgcagagagggaccccgggcgcctgctgagctcagctggcagagtttgcaagtggcggagacccttcaggtggcatccctgagtcctgatgcctgactggatggaggcccaccagcttctgttcccatgaggtagaaaggccaagcttggtcttcagctggggaagaggccagaaacaaggcccccagtgaaataacccagatccattggcctgaggagcagagaaagggcaagaagtgaactgcagctgctggtaaccctcagaaaccttctccaagtgctattctcacagttctttaggaacactctgaagtgaagaacaatatgtaggaaaatgggaccaacttatgtgtgttctgagcctcaaaacccccttgttggcccaaagaagctcaccttcagtttgggagggctggtaagctccatcctttctcatggcctcagccaagcattgaacttgccctccccttctggccttggtgatcactttttcaggaagagtgagactgaggacccccaagtgttccatccctaaggaaagcttgggaaaccaagccccttccatcctctcccaagcaccccagccaagccccagagagccagtccggaatgatcccactatggccaagctctggttcaaattccagcggtacttccgccggaaacctgtgcgcttctttaccttcctggcactctacctgactgctgggagccttgtcttccttcactctggctttgtgggccagcccgctgtctcggggaaccaggcgaaccccgctgctgcaggaggcccagctgagggtgctgagctgtccttcttgggtgacatgcatctgggcagaggtttccgggacacaggtgaagcctcaagcattgctcgcaggtacggaccctggttcaagggcaaggatgggaatgagagagccaagcttggcgactacggtggagcctggagccgagccctcaaggggagggttgtccgggagaaggaggaagagcgagccaagtacatcggctgctacctggatgacacccagagtcgggcccttcgaggagtgtccttttttgactacaaaaagatgaccatcttccgttgccaggacaactgtgctgaacggggttacctgtatggcgggctggagttcggcgccgagtgctactgcggccacaagatccaggcgacgaacgtgagcgaggcagagtgcgacatggagtgcaagggcgagcgaggcagcgtgtgcggcggcgccaaccgcctctctgtctaccggctgcagctggcccaggagtcggcccgcaggtatggaagtgcagtgttccggggctgcttccgcaggcccgacaacctttccctggccttacccgtgacagctgccatgctgaacatgtctgtggacaaatgcgtggacttctgcactgagaaggagtacccgctggcagctcttgcaggcaccgcctgccactgtgggtttcccaccacccgattcccgctccatgacagagaggatgagcagctctgtgcccagaagtgcagcgcggaggagtttgagagctgcgggactcctagttacttcattgtgtaccagacacaagtccaagacaaccgttgcatggacagaaggttcctgccaggcaagtccaagcagctcattgctttggccagcttcccaggtgctggcaacacgtgggctcgccacctcattgaattggccacaggcttctacactggcagctactacttcgatggctccctctacaacaaagggtttaaaggtgagcgggaccactggcgcagcggacggaccatctgcatcaagacgcacgaaagcggccagaaagagatcgaggccttcgacgccgccatcctgctcatccgcaacccctacaaagccctcatggctgagttcaaccgcaagtacggcggccacataggctttgctgcgcatgcccactggaagggcaaagagtggccagagttcgtgaggaactatgccccgtggtgggccactcacacactggactggctcaagtttggcaagaaggtgctggtggtgcactttgaggacctgaagcaggacctctttgtccagctgggccggatggtcagcctgctgggcgtggctgtcagggaggaccggctgctctgtgtggagagccagaaggatggcaacttcaagcgctcagggctccggaagctcgagtatgacccctatactgcggacatgcagaagaccatctctgcctacatcaagatggtggatgcagccctcaaagggcggaacctaacgggtgtccccgatgactactacccaagatgatgcgtccacacagggggagggtagactgggagtcctgaccacgcaggccctggggactcaagacccctggttacccccactcatctgtcctctctttggtctggggacaatccccttggctgctctttgccttcaatgagtttcctgcatgacagaggaggctcaagggaagagattgcccaggcactaccactctgctcacatgttccccccttggcaatgtggggcatcttgtttagggggttctagttacatggactcttttctgtctcctgggtccctgcccccaccactctgggttccatttgtgggagggagggctcatccacatcatggagacttgctggatgccccatggcaattgtcaaggctcttgatgcaagagcccagggggctattgtaaaaacttggccccagatgcttgtcccttctgggctgagatttcgcagcccccttctcatctccacccaagaagtgctggcaccgatgtttaactcaggccaccttctgttctaaagaaagattgctgggaagtttctccgtggccttaggtttctgacatcctggatagtgtggggaggtaatggtgctcacagtaggttaattggagacaccatgtggggccattggtgttatgagccccccaggccacactgcttctcagaaatgagctgcttgcctttccacctccagggcatgaaccctgcccctttctatccatgctgtgtccaggaggtgaccttgagatcctgataccaccttcaaggaacctcaggcaccaacagtgagcccacgaggatggtcacatgccatgtgcagaatttgacttaagagagagccccagtgacacatctctccatggtgggctccagtcagtcttacactgcccttctgacccctacaaatgggtcctttgctatccaggtgagacagcaagagtgttcttaatcagatggaaccacacccaaaatggacccccactaccttcccagaccatatatctccccttgatcatagtccaacagggccagcttcccttgggggccctttaaggaatggggtgaatgaaattgtgtcatttctatacaaacactgctctcttgatgctgaaatgccaaaccgaaggatttctgaggacctaaatcacggagcatcaatcttacaaagtgttggtccagagtcccatctcttccccaaccctggataccagtagcttcccacccagtccaaacctgcaccatccatcattatgtagatgaaaaagccataggtcatagcctctttgctattctattggagtagcctccctaggcagtccctctgaagccttggagtgcaggtaaatgctcattcccaagtagcaaagagaccatggagaaggtgcgtgtaaagagatatatttttgtaagaggaatatgattaatacattccgccccttggaacctggccatgcaaagcaagggcacagggattagacctgtggcacacttccccaattccctcatctgtaggatttgggctgccccaggcccacccagggggctctgaatgtattttgtaccgtgtttctttcccccaggagaatttttagtcttctttcatgaagcagtggaggggttggcctcccttctactgggaggttgactctctctgggagactcttggtccaagacctgggtcagttctttgctggtggtcccctctgaccacaagcttctgcctgaagattcctcaggtcaacaccatcattaaatgcgagttttgttgatgattctaccatgtggtagagtgttgtgtaagacaggttcacaaatgggatgttttcctagtgtgtgtgtgtgtgtgtgtgtgtgtgtatgagagagagagagagagacaacagagacagagagaggcagagaggcatagagagacagagagagagacaagaaacagagatagacagaaaatgttcggggtggcaggcgggttggtgtataactgctttgtgcctgtgtgactctggcatagctgctcagggagaattacgtgcctctgtgtgtaaaattgcctttgtgttctcctgcctctctatgttttgaaactgtatcccacaagttgccggtatgaccatcttatttgtaatgagtctgtgcaggtccttgtgtatggaattgcacccgtgtaaaggaggaaatggtcagtgtgcatgaaaaaaaaaaaaaaaaa

SEQ ID NO: 149 - DNA, 2352 bp, Homo sapiens
gccattaccaatcgcgaaaccgcgccggcggcggcggcggcggcggcggaggaggagaaaggaaagaggaagggggagcggcgagaggcggagacggagcccgacaggggcggcaccacggcacgagccccgcacagtccagtgtgaggggagcggcgctaagagcaggcgacgccgccgccgccaccaccaccgccatagatacactctcatcctacgggccacgcctgggccttgctgccaggaagcttcggccccgcagctcggcttgctgcggtctcaggtttctttacctccagaaagaagaatattggccccttgaattctggaagttcattgaagagtctgaaattagggacttatttcaaatttggacatggctagtcgaggcgcaacaagacccaacgggccaaatactggaaataaaatatgccagttcaaactagtacttctgggagagtccgctgttggcaaatcaagcctagtgcttcgttttgtgaaaggccaatttcatgaatttcaagagagtaccattggggctgcttttctaacccaaactgtatgtcttgatgacactacagtaaagtttgaaatatgggatacagctggtcaagaacgataccatagcctagcaccaatgtactacagaggagcacaagcagccatagttgtatatgatatcacaaatgaggagtcctttgcaagagcaaaaaattgggttaaagaacttcagaggcaagcaagtcctaacattgtaatagctttatcgggaaacaaggccgacctagcaaataaaagagcagtagatttccaggaagcacagtcctatgcagatgacaatagtttattattcatggagacatccgctaaaacatcaatgaatgtaaatgaaatattcatggcaatagctaaaaaattgccaaagaatgaaccacaaaatccaggagcaaattctgccagaggaagaggagtagaccttaccgaacccacacaaccaaccaggaatcagtgttgtagtaactaaacctctagtttgaactagctggaatagtcttctgcttcctaaatgttaataacaatggaattggagcatttaaccagcccagtatgacttccaaaagaagagacttatgatagagtcaagtttctaatacagaattattttaagtgttttgaacttaatttttaataacatgcatgggtccctctcactaatgtttcaacaatagggaaaaatgagaactatgtggacacttgtttcattggaaggttagggggaataatttctcatcactaggaatatagacaaatgactgtctgggcccacacagttaaccagcccatttctccacactggtacagtagtcacctgtgaaaaaaaaaaattggaacttactaatttgggcttttcaaaaacattctttgtttagaaggagattctaaagttatttatgatgcttagccatagtattcaggcaaatgttcatttctcctggtacctgtatttaaaatgtacattccacattttaataaattaaccacaagaaaataatcccacatatacaaggtcaggggtggggaagagtattaatggtatcttaattatacccagtctggttttttttttaaatggggtaaaaatcaaatgcaaccccatcttgttttaggaattttgagaactaataaatgcaccttaatggtcagtgttcctttcaaacatgtgagttctttaacaaaaatgaaataaaccaggtgtctgtgatttctaattaatcaccgctggccattacacaggttttgttgtttggggtggggagggggcttttgttcccttttgacataatatagtcaatgcactaacaattatgtatattcaaacttgattattttaaattcgatcttcagctgtactgtaaatagggtactgcattgtagtctccatatctgtattacttttctgtaatatttaagagttgcttaaaagcatacaaaatgtactgttactaaaacagctaattatttctctctccccctttgacaggaaggggcttcagttgttcctccatggctagaaccataataaacaatgtacccgtaatttgtaacataaagtattgcaatatgttagtaacaatcttgcagccttcctttccaaagttcattttattttgatcagttcagtatattgcactaattattttaggtattttcattatatgaaagctaccatgtgtcagagatgatttaatctatttaagtgttggactgctaggagaacttgtacatttatgataatgcagaattaggaaaacggttcaccagtgtttagttttatattgaggtgctcaggtt

SEQ ID NO: 150 - DNA, 1511 bp, Homo sapiens
cagacagaccaatcacgcgcattcttcggccacgacaagcgcgcctctgatcacgtgaccaggtccgctacccacgtgggggctcagcgtgcacccttctttgtgctcgggttaggaggagctaggctgccatcgggccggtgcagatacggggttgctcttttgctcataagaggggcttcgctggcagtctgaacggcaagcttgagcaacgcggtaaaaatattgcttcggtgggtgacgcggtacagctgcccaagggcgttcgtaacgggaatgccgaagcgtgggaaaaagggagcggtggcggaagacggggatgagctcaggacagagccagaggccaagaagagtaagacggccgcaaagaaaaatgacaaagaggcagcaggagagggcccagccctgtatgaggaccccccagatcagaaaacctcacccagtggcaaacctgccacactcaagatctgctcttggaatgtggatgggcttcgagcctggattaagaagaaaggattagattgggtaaaggaagaagccccagatatactgtgccttcaagagaccaaatgttcagagaacaaactaccagctgaacttcaggagctgcctggactctctcatcaatactggtcagctccttcggacaaggaagggtacagtggcgtgggcctgctttcccgccagtgcccactcaaagtttcttacggcataggcgatgaggagcatgatcaggaaggccgggtgattgtggctgaatttgactcgtttgtgctggtaacagcatatgtacctaatgcaggccgaggtctggtacgactggagtaccggcagcgctgggatgaagcctttcgcaagttcctgaagggcctggcttcccgaaagccccttgtgctgtgtggagacctcaatgtggcacatgaagaaattgaccttcgcaaccccaaggggaacaaaaagaatgctggcttcacgccacaagagcgccaaggcttcggggaattactgcaggctgtgccactggctgacagctttaggcacctctaccccaacacaccctatgcctacaccttttggacttatatgatgaatgctcgatccaagaatgttggttggcgccttgattactttttgttgtcccactctctgttacctgcattgtgtgacagcaagatccgttccaaggccctcggcagtgatcactgtcctatcaccctatacctagcactgtgacaccacccctaaatcactttgagcctgggaaataagccccctcaactaccattccttctttaaacactcttcagagaaatctgcattctatttctcatgtataaaactaggaatcctccaaccaggctcctgtgatagagttcttttaagcccaagattttttatttgagggttttttgttttttaaaaaaaaattgaacaaagactactaatgactttgtttgaattatccacatgaaaataaagagccatagtttcaaaaaaaaaaaaaaaaaaaa

SEQ ID NO: 151 - DNA, 4422 bp, Homo sapiens
cgcagagcgcgcacccaagcggccggacctccccgactcccgggccgcccccgtctcgcgccctgcctccctccttcggccttcacctacccgcctccggattggccgctaggaatcccgcccctctaaagccctgcctgctattggtcacgattttataatcaatggataaagtgggaaaaatgtggaataacttcaaatacaggtgtcagaatctcttcggtcatgagggaggaagccgtagtgaaaatgtggacatgaactccaacagatgtttgtctgtcaaagagaaaaacatcagcataggagactcaactcctcagcaacaaagcagtcccttaagagaaaatattgccttacaactgggattaagcccttcgaagaattcttcaaggagaaatcaaaattgtgccacagaaatccctcaaattgttgaaataagcatcgaaaaggataatgattcttgtgttaccccaggaacaagacttgcacgaagagattcctactctcgacatgctccatggggtgggaagaaaaaacattcctgttctacaaagacccagagttcattggatgctgataaaaagtttggtagaactcgaagtggacttcaaaggagagagaggcgctacggcgtaagttctgtacacgacatggacagtgtttccagcagaactgtaggaagtcgctctctaagacagaggttgcaggatactgtgggcttgtgttttcccatgagaacttacagcaagcagtcaaagcctctcttttccaataaaagaaaaatccatctctctgaattaatgcttgagaaatgcccttttcctgctggctcagatttagcccaaaaatggcatttgattaaacagcatacagctcctgtgagcccacattcaacattttttgatacatttgatccatctttggtttctacagaagatgaagaagataggcttagagagagaaggcggcttagtattgaagaaggggttgatccccctcccaatgcacaaatacatacatttgaagctactgcacaggttaatccattatataaactgggaccaaaattagctcctggaatgactgaaataagtggggacagttctgcaattccacaagctaattgtgactcggaagaggatacaaccaccctgtgtttgcagtcacggaggcagaagcagcgtcagatatctggagacagccatacccatgttagcagacagggagcttggaaagtccacacacagattgattacatacactgcctcgtgcctgatttgcttcaaattacagggaatccctgttactggggagtgatggaccgttatgaagcagaagcccttctcgaagggaaacctgaaggcacgtttttgctcagggactctgcgcaagaggactacctcttctctgtgagcttccgccgctacaacagatccctgcatgcccgaattgagcagtggaatcacaactttagtttcgacgcccatgacccgtgtgtatttcactcctccactgtaacgggacttttagaacattataaagatcccagttcgtgcatgttttttgaaccattgcttactatatcactaaataggactttcccttttagcctgcagtatatctgtcgcgcggtaatctgcaggtgcactacgtatgatggaattgatgggctccctctaccctcaatgttacaggattttttaaaagagtatcattataaacaaaaagttagagttcgctggttggaacgagaaccagtcaaggcaaagtaaactctccggtccccaaaggttgttaactaggtccgctttcatgtgcatcagacagtacacctatagcaagcacacgtagcagtgttaggctttttcatacagtatgtaagcttagtgttagtatctgtcagatgctacctgctgttacttattcagataaacatggtgcctattggaacaatagcggatagagctacaggtgttcagtaagactacaaaaacattttgcctatttcgctaacagtttggtttttaatggctgtggtatttgagtgaggcaactctggggcatttgttatgaagaattctatttcttactgaagaacaaattattaatattggatgagtatttcaacagtgtgactaatgtttgaaattattttttctaagagtttttctataaccttccaaaagtcgtgatgtttgtagttactataaatcaagctttggaagtccaaaaagaataaaagactgccttccttttagaaaaaaatgcaattttctggccacaagggcatagtgcagttcacttacgtgttgatgtagtttataatcagacgccttttctcttctgcaaaaggtactgttaagtaaaccagattttctaaataggcattcttaaaatttcagacttacaaagctagtagtagaattttattgaaaggcctaggtattaattttttaaatgagtgctttaacttaaaacaggcgtttggaatagctgctgcaatgtagtcttgtgtgtgatttttttttaagttgatgtgcagtctaattgttgtttcataaaagttggatctgttcctatgcccaggatgattttgtgaaccgtgaagtacgtgagactagaagacgcccaaacaagtcagataatagtaactacaatggttgctgatgttgagattattgttgaactataattaataatttggatggcagaatttatctcttttttgtaaactctcataactgaattgcttaagtataatttatagaatttcagtgcagttcattcttaatggaaaatctgaaacctaaattgcagatttaaaaggtactgtacaaccattatatctgtaaataacttagcacctttttgtcacttagaataatatgtactactacttgagtgagcgcttttggaagttatatcaagttctagtgtttgcttcttagtaactgaactgaatttacagttctgtcctagacattttgcactaaagtagccgaatccactctcatgtcttttcgttaatgtgctctgtaccactggtgagtgctccatagtttccttacctgctgctacagaatgttattttacatccctatggctattgccaaggctacaaaaaaggaaagctatatttgtatgcaacactaaccttttgactgctaatgtatgtttctgcttgctgtgccttgttatggctgctttttttgtgctaataaagtatgtttggtgttctccttgtatatctgctgttttatacatttgcaacaatttctcttgtaaatggaatggtttggggtttttaaataagcattaactaacaacctttctatagttaatgcagagttaatgaacagtctaatattgacttatcagaataagctaactctaaatttaatgctctacatcttatcagtcataattatatatactgtggaacagtatctgtagttactgcaaattactgtacagtttaggttataacagaaaactgacagagaagtaataaacctattgatttctctgcttataaatgaaagattgaaactatccaatgacatattatagtaaatgagtatctgtaacctcccactgcatcagaagcaggttaaatgaagtcttgtgaatttgtaatagatcagtaccatttattggtttggggaccatcttaattaaaaataaatgcccaaaatgtagaactttaaccaaagacttgtcccttttaaagcaaaatggggattgaagggacttataatttctgttgtttctaattaaagtccctgaagatcatataccaaagtgtttgagaacttcatccaaacctactttaaagcattatgtgcaattaagttgttatgacataattatattgcctaattgttgggtcttttttcttgagcttataatgtacctggaaaataaacctcttgagaaaaagaaaagttcatactgattattggaaaaggactatatatgtgagcaagattgtgttttagagaggaaacttgaaactccaagaaagcacttgatgtttttatatgcttgtagcaaattgatgttctaactgtagttttatagaaagtattaatgcttttatgtatttcaaaactttcatatgttaaatggaaattgttttaaatgtgtttgagtttatgtaagcatgtatacactgtgctaaaagtcacatgtttcagtttgtgtataatattaatatgcaatttttggtttaaatttttgtcttaaaatattagtggcttacattttaaaaaagaaaaatcaccagcatgaacttgcacctaagtctatattcactgtgtccttttctgaatcccattgtagcctgtcaactaaatttgagtgttaacggtctttttaaagtgcatttaaatacaaaccaggaatttctttagaagttga

SEQ ID NO: 152 - DNA, 5171 bp, Homo sapiens
ggcgggaggagagtcggcggccggagccgtcaccccgggcggggacccagcgcaggcaactccgcgcggcggcccggccgagggagggagcgagcgggcgggcgggcaagccagacagctgggccggagcagccgcgggcgcccgaggggccgagcgagattgtaaaccatggctgtgtggatacaagctcagcagctccaaggagaagcccttcatcagatgcaagcgttatatggccagcattttcccattgaggtgcggcattatttatcccagtggattgaaagccaagcatgggactcagtagatcttgataatccacaggagaacattaaggccacccagctcctggagggcctggtgcaggagctgcagaagaaggcagagcaccaggtgggggaagatgggtttttactgaagatcaagctggggcactatgccacacagctccagaacacgtatgaccgctgccccatggagctggtccgctgcatccgccatatattgtacaatgaacagaggttggtccgagaagccaacaatggtagctctccagctggaagccttgctgatgccatgtcccagaaacacctccagatcaaccagacgtttgaggagctgcgactggtcacgcaggacacagagaatgagttaaaaaagctgcagcagactcaggagtacttcatcatccagtaccaggagagcctgaggatccaagctcagtttggcccgctggcccagctgagcccccaggagcgtctgagccgggagacggccctccagcagaagcaggtgtctctggaggcctggttgcagcgtgaggcacagacactgcagcagtaccgcgtggagctggccgagaagcaccagaagaccctgcagctgctgcggaagcagcagaccatcatcctggatgacgagctgatccagtggaagcggcggcagcagctggccgggaacggcgggccccccgagggcagcctggacgtgctacagtcctggtgtgagaagttggccgagatcatctggcagaaccggcagcagatccgcagggctgagcacctctgccagcagctgcccatccccggcccagtggaggagatgctggccgaggtcaacgccaccatcacggacattatctcagccctggtgaccagcacgttcatcattgagaagcagcctcctcaggtcctgaagacccagaccaagtttgcagccactgtgcgcctgctggtgggcgggaagctgaacgtgcacatgaaccccccccaggtgaaggccaccatcatcagtgagcagcaggccaagtctctgctcaagaacgagaacacccgcaatgattacagtggcgagatcttgaacaactgctgcgtcatggagtaccaccaagccacaggcacccttagtgcccacttcaggaatatgtccctgaaacgaattaagaggtcagaccgtcgtggggcagagtcggtgacagaagaaaaatttacaatcctgtttgaatcccagttcagtgttggtggaaatgagctggtttttcaagtcaagaccctgtccctgccagtggtggtgatcgttcatggcagccaggacaacaatgcgacggccactgttctctgggacaatgcttttgcagagcctggcagggtgccatttgccgtgcctgacaaagtgctgtggccacagctgtgtgaggcgctcaacatgaaattcaaggccgaagtgcagagcaaccggggcctgaccaaggagaacctcgtgttcctggcgcagaaactgttcaacaacagcagcagccacctggaggactacagtggcctgtctgtgtcctggtcccagttcaacagggagaatttaccaggacggaattacactttctggcaatggtttgacggtgtgatggaagtgttaaaaaaacatctcaagcctcattggaatgatggggccattttggggtttgtaaacaagcaacaggcccatgacctactcattaacaagccagatgggaccttcctcctgagattcagtgactcagaaattggcggcatcaccattgcttggaagtttgattctcaggaaagaatgttttggaatctgatgccttttaccaccagagacttctccattcggtccctagccgaccgcttgggagacttgaattaccttatctacgtgtttcctgatcggccaaaagatgaagtatactccaaatactacacaccagttccctgcgagtctgctactgctaaagctgttgatggatacgtgaagccacagatcaagcaagtggtccctgagtttgtgaacgcatctgcagatgccgggggcggcagcgccacgtacatggaccaggccccctccccagctgtgtgtccccaggctcactataacatgtacccacagaaccctgactcagtccttgacaccgatggggacttcgatctggaggacacaatggacgtagcgcggcgtgtggaggagctcctgggccggccaatggacagtcagtggatcccgcacgcacaatcgtgaccccgcgacctctccatcttcagcttcttcatcttcaccagaggaatcactcttgtggatgttttaattccatgaatcgcttctcttttgaaacaatactcataatgtgaagtgttaatactagttgtgaccttagtgtttctgtgcatggtggcaccagcgaagggagtgcgagtatgtgtttgtgtgtgtgtgtgtgtgtgtgtgtgtgtgcgtgtttgcacgttatggtgtttctccctctcactgtctgagagtttagttgtagcagaggggccacagacagaagctgtggtggtttttactttgtgcaaaaaggcagtgagtttcgtgaagcctggaagttggccatgtgtcttaagagtggctggactttgacatgtggctgtttgaataagagaaggacaaagggaggagaaagcacatgtgctccagtgagtcttcgtcactctgtctgccaagcaattgatatataaccgtgattgtctctgcttttcttctgaaatgtagataactgctttttgacaaagagagccttccctctcccccacccctgtgttcttgggtaggaatgggaaaaggggcaacctacaaagattgttggggcaagggaagtcacaagctttcggatgggcggtggcttttcacaaaacatttagctcatcttattctctctttgtcctctctcccctcctgcccgcccgcaccctggaattgccactcagttcctctgggtgtgcacatatgtttggagaaatagaggagagaaaagagggccacgtaactgagagcttacagtgccaatgccgtttgtgttctggccagagtggagtgcgcagccctgactcccaggcgctgagattgttgcctggttacccaggaagctgctgttccggctgcccagcctttctctgagccagcggatgcacagtccgtggccttcttcaggcttattgatgatgctttttgcaaatgttgaatcatggttctgtttctaagttggatcttttttgttttctccttgccaccctaatttgacatcaaaattctctcttgtgcattgggccctgggtcattcaaacccaggtcacctcattccccttctctgttcacacctaatgtcttgaagagtaggtagcagcagtgtgggctgaacctaggccagcttgcttagcgggtcaccctgctgtgaagtcctggcaggtgttggtaatgtgtggaaatgcagtcagcaagtttgctggggagtttgataaaagtataaaacaaaacaaaaaaagcctcggtataattttgttccacgacttcttctgtagctttacaccagaaggaaggaatgggctacagcaggtagtggaggaagaggggggtgagcaggtgtattaaaatagcttacgggtaaggcctaaaaggtcacccctcggccccctctccaaaagaagggcatgggcacccccaggagaggatggccccaaaaaccttatttttatacatgagagtaaataaacatattttttttacaaaaataacttctgaatttatcagtgttttgccgttaaaaatattcctctatagtaaattatttattggaagatgacttttttaaagctgccgtttgccttggcttggtttcatacactgatttatttttctatgccaggcagtagagtctctctgcctctgaggagcaggctacccgcatcccactcagcccctccctacccctcaagatttgatgaaaattccaaccatgaggatgggtgcatcggggaagggtgagaaggagagcctgcctgctcagggatccaggctcgtagagtcactccctgcccgtctcccagagatgcttcaccagcacctgcctctgagacctcgctctctgttccagcaaccctggttggggggtcagacttgatacactttcaggttgggagtggacccaccccagggcctgctgaggacagagcagccaggccgtcctggctcactttgcagttggcactgggttggggaggaagagagctgatgagtgtggcttccctgagctggggtttccctgcttgtccagttgtgagctgtcctcggtgttaccgaggctgtgcctagagagtggagatttttgatgaaaggtgtgctcgctctctgcgttctatcttctctctcctccttgttcctgcaaaccacaagataaaggtagtggtgtgtctcgaccccatcagcctctcacccactcccagacacacacaagtcctcaaaagtttcagctccgtgtgtgagatgtgcaggttttttctagggggtagggggagactaaaatcgaatataacttaaaatgaaagtatactttttataatttttctttttaaaacttggtgaaattatttcagatacatattttagtgtcaaggcagattagttatttagccaccaaaaaaaagtattgtgtacaatttggggcctcaaatttgactctgcctcaaaaaaaagaaatatatcctatgcagagttacagtcacaaagttgtgtattttatgttacaataaagccttcctctgaagggaaaaaaaaaaaaaaaaaaaaaaaaaaaaaaaaaaaaaaaaaaaaaaaaaaaaaaaaaaaaaaaaaaaaaaaaaaaaaa

SEQ ID NO: 153 - DNA, 5019 bp, Homo sapiens
acagacaagatgtcggcggatggtagcttcgagcccttgcggagaggagcatctctgtgacagaagcttgtcgacggcggcttctaggagctagtcgaaggagcgaggttgaggcgggcagcgacccgtcaggtcgctcacctgggcaccggccagctgcgagacgtgacttggggaccgcaggggagtggagagtgtgaggtgccaaagactagtaatgccccgtatccccctaggaagccgggaagccaagctccgcgggaccgcttcatgccgctgactggtgtagagcccgccagaatgaacaggaagaaaggagacaagggctttgaaagcccaaggccatataaattaacccatcaggtcgtctgcatcaacaacataaatttccagagaaaatctgttgtgggatttgtggaactgactatatttcccacagttgcaaacttgaatagaatcaagttgaacagcaaacagtgtagaatataccgagtaaggatcaatgatttagaggctgcttttatttataatgacccaaccttggaagtttgtcacagtgaatcaaaacagagaaacctcaattatttttccaatgcttatgcagctgcagttagtgctgtggaccctgatgcaggaaatggagaactttgcattaaggttccatcagagctatggaaacacgttgatgagttaaaggtcctgaagatacacatcaatttttctttggatcagcccaaaggaggtcttcattttgtggtacccagtgtagagggaagtatggcagagagaggtgctcatgttttctcttgtgggtatcaaaattctacaagattttggttcccttgtgttgattcatactctgaattgtgtacatggaaattagaatttacagtagatgctgcaatggttgctgtttctaatggcgatttggtggagacagtgtatactcatgatatgaggaagaaaactttccattatatgcttaccattcctacagcagcgtcaaatatctccttggccattggaccatttgaaatactggtagatccatacatgcatgaggttactcatttttgtttgccccaacttcttccattgctgaaacataccacatcataccttcatgaagtctttgaattttatgaagaaattcttacatgtcgttacccatactcctgttttaagactgtcttcattgatgaggcttatgttgaagtggctgcttatgcttccatgagcatttttagcacaaatcttttacacagtgccatgattatagatgagacacctttgactagaaggtgtttagcccaatccttggcccagcagttttttggttgtttcatatctagaatgtcttggtctgatgaatgggtgctgaagggaatttcaggctatatctatggactttggatgaaaaaaacttttggtgttaatgagtaccgccattggattaaagaggagctagacaaaatagtggcatatgaactaaaaactggtggggttttactacatcccatatttggtggaggaaaagagaaggataatccggcttcccatctacacttttcaataaagcatccacatacactgtcctgggaatactacactatgtttcagtgtaaagcccaccttgtgatgagattgattgaaaataggatcagtatggaatttatgctacaagttttcaataaactgctaagtctggctagtactgcttcatctcagaagttccagtcacatatgtggagtcagatgttggtttccacatctgggtttttgaaatccatttcaaatgtctctggcaaagatattcagccgttaataaagcagtgggtagatcagagtggagtggtaaaattttatggaagttttgcatttaatagaaaacgaaatgtcttggaactggaaataaaacaggactatacatctcctggaactcagaaatacgtgggaccacttaaagtgacagtgcaggagttagatggatccttcaatcatacactgcaaattgaagaaaacagccttaaacatgatataccctgccattccaaaagtagaaggaataaaaagaaaaaaatcccactgatgaatggagaagaagttgatatggatctttctgcaatggatgctgattcccctttgctgtggataaggatagacccagatatgtcagtattgaggaaggtagaatttgagcaagctgattttatgtggcagtatcagctccgctatgagagagatgttgttgcacagcaggaatccattttggctttggaaaaattccctactccagcatctcggcttgcactcactgatatattagaacaagagcagtgtttctacagagtaagaatgtcagcttgcttctgtcttgcaaagattgcaaattcaatggtgagcacatggacaggaccaccagccatgaagtcactcttcactaggatgttttgttgtaaaagttgtccaaacattgtgaaaacaaacaactttatgagctttcaaagctattttctacagaagactatgccagttgcaatggctttattaagagatgttcataatctttgtcctaaagaagtcttaacgtttattttagacttaatcaagtacaatgacaacaggaaaaataagttttcagataactattatcgtgcagaaatgattgatgccctggccaactctgttacacctgcagtcagtgtgaataatgaagttagaactttggataacttaaatcctgatgtgcgactcattcttgaagaaatcaccagatttttgaatatggaaaaacttcttccgagttacaggcataccatcactgtcagttgtttgagagccatacgggtacttcagaagaacggacatgtgccaagtgatccagctctttttaaatcttatgctgaatatggccactttgtggacattaggatagcagctttggaagcagttgttgattatactaaagtggacagaagttatgaagaactgcaatggctacttaatatgattcagaatgaccctgtaccctatgtaaggcataagattctcaacatgttgactaagaacccaccatttactaagaacatggagtctcccttatgcaatgaagccctggtagatcaactttggaaacttatgaattctggtacttcacatgactggaggttacggtgtggtgctgtggacttgtacttcacactttttggcctcagtagaccttcctgtttacccttgccagagcttgggttggttcttaatctaaaggagaaaaaagctgtcttgaatcctaccataattccagagtcagtagcaggcaaccaagaagctgcaaataatccaagcagtcacccacagctagttggatttcagaaccctttttccagttctcaagatgaggaggagattgatatggatactgttcatgatagccaggccttcatttcccatcatttaaacatgcttgaaaggccgtcaactccagggctctcgaaatatcggccagctagctcccgatctgctttaataccccagcactcagcaggctgtgacagcacacccaccacaaaaccccagtggagtttggaacttgcacggaagggaacaggtaaagaacaagcacctttggagatgagtatgcatccagcggcaagcgctccactctcagtctttactaaggaatctacagcctccaaacacagtgaccaccatcaccaccatcaccatgagcacaagaaaaagaagaagaagcataaacataagcacaaacacaagcataagcatgacagtaaagaaaaggacaaggagcctttcactttctccagccctgccagtggcaggtctattcgttctccttccctttcagactgagaaggggacaaaaagacctttcctttcatgtccagaagaatgtatgtaactaaagctttgtcctctgtgaagaattataaaagggaggggggaaaggattcgcctctcctacagaaattctgaattcatttaagttctaagcatttgatttatgttatttatacagttgggatctaattaggaaaatgtgttttgtagttctggataaactatttcatccgctgtttcctccccaaaacacacacacagagcaaactccctttcataaaagccctcatatccactggcagtccccgttcgcatcatggtctccatgtgtaccgccaaagtcaattatgtttgaaagcctttggtggatgttatggggcaaagttatgatttacacagaagcaactgccaaatctgtggtgcaaccactatctccagtgaaatattgtataacaccatttggaactactgaaaagacagtggcttttctacagtactcttccttattgcaccatttttgtattaacgtagaaactaagcatcagaatttatgaacaaagaatatgttatttttccttttgctctaaaatactgagatttggggaagcaattcttttttaaaaaaattttgaataactatcttttgataacacattcggcggttacgatgttggaatttagcagaactatcaaatccaaaattattttcaaatcaagatgtttaaattataagtttttttgttttgttttccagtaagtataaatgaaaatattcatatgtaaaatatgttttgcttaatgtggacaatttacacacccaacacatactgtttccaaaattatttctatatgacacaaagtatgatacctttaaaaaggtgagcttatatattgtttattaacctggaaatagacaatttggctctcataccataagcatttaaaaacatatgaaatattttgatttctttatatggtggtgtgtttttatttctgaattttccatgtgctttaatatttgtttaagaatattttttatatctgttcaatttttatcattccccttatcattagaaagtttgacaaaaatacttgaatcttggacctctaaatatacttttagttgtgtttaacttgtttaataaataactttttaagttg

SEQ ID NO: 154 - DNA, 1550 bp, Homo sapiens
gtagtggtgccgacttcctgttgtttgaggccgggttgggggtgtgcgattgtgtgggacggtctggggcagcccagcagcggctgaccctctgcctgcggggaagggagtcgccaggcggccgtcatggcggtgtcggagagccagctcaagaaaatggtgtccaagtacaaatacagagacctaactgtacgtgaaactgtcaatgttattactctatacaaagatctcaaacctgttttggattcatatgtttttaacgatggcagttccagggaactaatgaacctcactggaacaatccctgtgccttatagaggtaatacatacaatattccaatatgcctatggctactggacacatacccatataatccccctatctgttttgttaagcctactagttcaatgactattaaaacaggaaagcatgttgatgcaaatgggaagatatatcttccttatctacatgaatggaaacacccacagtcagacttgttggggcttattcaggtcatgattgtggtatttggagatgaacctccagtcttctctcgtcctatttcggcatcctatccgccataccaggcaacggggccaccaaatacttcctacatgccaggcatgccaggtggaatctctccatacccatccggataccctcccaatcccagtggttacccaggctgtccttacccacctggtggtccatatcctgccacaacaagttctcagtacccttctcagcctcctgtgaccactgttggtcccagtagggatggcacaatcagcgaggacaccatccgagcctctctcatctctgcggtcagtgacaaactgagatggcggatgaaggaggaaatggatcgtgcccaggcagagctcaatgccttgaaacgaacagaagaagacctgaaaaagggtcaccagaaactggaagagatggttacccgtttagatcaagaagtagccgaggttgataaaaacatagaacttttgaaaaagaaggatgaagaactcagttctgctctggaaaaaatggaaaatcagtctgaaaacaatgatatcgatgaagttatcattcccacagctcccttatacaaacagatcctgaatctgtatgcagaagaaaacgctattgaagacactatcttttacttgggagaagccttgagaaggggcgtgatagacctggatgtcttcctgaagcatgtacgtcttctgtcccgtaaacagttccagctgagggcactaatgcaaaaagcaagaaagactgccggtctcagtgacctctactgacttctctgataccagctggaggttgagctcttcttaaagtattcttctcttccttttatcagtaggtgcccagaataagttattgcagtttatcattcaagtgtaaaatattttgaatcaataatatattttctgttttcttttggtaaagactggcttttattaatgcactttctatcctctgtaaactttttgtgctgaatgttgggactgctaaataaaatttgttgcataaaaaaaaaaaaaaaaaa

SEQ ID NO: 155 - DNA, 1451 bp, Homo sapiens
tctctctaaccgcgccagtgtgcctccgactcggaacggcttccgcggccggggcagcgagggccgggggcggcgggcgggatgagtgcggtgtgcggtggagcggcgcggatgctgcggacgccgggacgccacggctacgccgccgagttctccccgtacctgccgggccgcctggcctgcgccaccgcgcagcactacggcatcgcgggctgtggaaccctactaatattggatccagatgaagctgggctaaggctttttagaagctttgactggaatgatggtttgtttgatgtgacttggagtgagaacaacgaacatgtcctcatcacctgtagtggcgatggctcgctgcagctctgggacactgccaaagctgcagggccactgcaagtctataaagaacacgctcaggaggtgtatagtgttgattggagccaaaccagaggtgaacagcttgtggtgtctggctcatgggatcaaactgtcaaattgtgggatccaactgttggaaagtctctgtgcacctttagaggccatgaaagtattatttatagcacaatctggtctccccacatccctggttgttttgcttcagcctcaggtgatcagactctgagaatatgggatgtgaaggcagcaggagtaagaatcgtgattcctgcacatcaggcagaaatcttgagttgtgactggtgtaaatacaatgagaatttgctggtgaccggggcggttgactgtagtttgagaggctgggacttaaggaatgtacgacaaccagtgtttgaacttcttggtcatacctatgctattaggagggtgaaattttcaccatttcatgcttctgtgctggcctcttgctcgtatgattttactgtaagattctggaacttttcaaagcctgactctcttcttgaaacagtggagcatcatacagagtttacttgtggtttagacttcagtcttcagagccccactcaggtggctgactgttcttgggatgaaacaataaagatctatgaccctgcttgtcttactattcctgcttgagatacactactttggtcagaaacagaggatgttggctgaagaactgcctaacagcaaataaattaactatggaaaacatagacattatgcttttatatgctattcagatttcaaatctttccaatttaccctggaatcagttttgagggagctgataaagactttagctgactcgttaagcctgatacataagccatatttaaaattctaagaaataattaatgttatgatatatcttgtagtatctattaaaatgtagtctctgggtcataaaatggattaaaatatgggagatcagtaggttatacgtatatagatagtgatatatttcatttttaatttgtcatttttgatgtaaaatataatcactgctgtgataaataaactatctattgatc

SEQ ID NO: 156 - DNA, 2856 bp, Homo sapiens
tagtcgcgggtccccgagtgagcacgccagggagcaggagaccaaacgacgggggtcggagtcagagtcgcagtgggagtccccggaccggagcacgagcctgagcgggagagcgccgctcgcacgcccgtcgccacccgcgtacccggcgcagccagagccaccagcgcagcgctgccatggagcccagcagcaagaagctgacgggtcgcctcatgctggctgtgggaggagcagtgcttggctccctgcagtttggctacaacactggagtcatcaatgccccccagaaggtgatcgaggagttctacaaccagacatgggtccaccgctatggggagagcatcctgcccaccacgctcaccacgctctggtccctctcagtggccatcttttctgttgggggcatgattggctccttctctgtgggccttttcgttaaccgctttggccggcggaattcaatgctgatgatgaacctgctggccttcgtgtccgccgtgctcatgggcttctcgaaactgggcaagtcctttgagatgctgatcctgggccgcttcatcatcggtgtgtactgcggcctgaccacaggcttcgtgcccatgtatgtgggtgaagtgtcacccacagcctttcgtggggccctgggcaccctgcaccagctgggcatcgtcgtcggcatcctcatcgcccaggtgttcggcctggactccatcatgggcaacaaggacctgtggcccctgctgctgagcatcatcttcatcccggccctgctgcagtgcatcgtgctgcccttctgccccgagagtccccgcttcctgctcatcaaccgcaacgaggagaaccgggccaagagtgtgctaaagaagctgcgcgggacagctgacgtgacccatgacctgcaggagatgaaggaagagagtcggcagatgatgcgggagaagaaggtcaccatcctggagctgttccgctcccccgcctaccgccagcccatcctcatcgctgtggtgctgcagctgtcccagcagctgtctggcatcaacgctgtcttctattactccacgagcatcttcgagaaggcgggggtgcagcagcctgtgtatgccaccattggctccggtatcgtcaacacggccttcactgtcgtgtcgctgtttgtggtggagcgagcaggccggcggaccctgcacctcataggcctcgctggcatggcgggttgtgccatactcatgaccatcgcgctagcactgctggagcagctaccctggatgtcctatctgagcatcgtggccatctttggctttgtggccttctttgaagtgggtcctggccccatcccatggttcatcgtggctgaactcttcagccagggtccacgtccagctgccattgccgttgcaggcttctccaactggacctcaaatttcattgtgggcatgtgcttccagtatgtggagcaactgtgtggtccctacgtcttcatcatcttcactgtgctcctggttctgttcttcatcttcacctacttcaaagttcctgagactaaaggccggaccttcgatgagatcgcttccggcttccggcaggggggagccagccaaagtgataagacacccgaggagctgttccatcccctgggggctgattcccaagtgtgagtcgccccagatcaccagcccggcctgctcccagcagccctaaggatctctcaggagcacaggcagctggatgagacttccaaacctgacagatgtcagccgagccgggcctggggctcctttctccagccagcaatgatgtccagaagaatattcaggacttaacggctccaggattttaacaaaagcaagactgttgctcaaatctattcagacaagcaacaggttttataatttttttattactgattttgttatttttatatcagcctgagtctcctgtgcccacatcccaggcttcaccctgaatggttccatgcctgagggtggagactaagccctgtcgagacacttgccttcttcacccagctaatctgtagggctggacctatgtcctaaggacacactaatcgaactatgaactacaaagcttctatcccaggaggtggctatggccacccgttctgctggcctggatctccccactctaggggtcaggctccattaggatttgccccttcccatctcttcctacccaaccactcaaattaatctttctttacctgagaccagttgggagcactggagtgcagggaggagaggggaagggccagtctgggctgccgggttctagtctcctttgcactgagggccacactattaccatgagaagagggcctgtgggagcctgcaaactcactgctcaagaagacatggagactcctgccctgttgtgtatagatgcaagatatttatatatatttttggttgtcaatattaaatacagacactaagttatagtatatctggacaagccaacttgtaaatacaccacctcactcctgttacttacctaaacagatataaatggctggtttttagaaacatggttttgaaatgcttgtggattgagggtaggaggtttggatgggagtgagacagaagtaagtggggttgcaaccactgcaacggcttagacttcgactcaggatccagtcccttacacgtacctctcatcagtgtcctcttgctcaaaaatctgtttgatccctgttacccagagaatatatacattctttatcttgacattcaaggcatttctatcacatatttgatagttggtgttcaaaaaaacactagttttgtgccagccgtgatgctcaggcttgaaatcgcattattttgaatgtgaagggaa

SEQ ID NO: 157 - DNA, 3962 bp, Homo sapiens
gaattccggcgtcgcggacgcatcccagtctgggcgggacgctcggccgcggcgaggcgggcaagcctggcagggcagagggagccccggctccgaggttgctcttcgcccccgaggatcagtcttggccccaaagcgcgacgcacaaatccacataacctgaggaccatggatgctgatgagggtcaagacatgtcccaagtttcagggaaggaaagcccccctgtaagcgatactccagatgagggcgatgagcccatgccgatccccgaggacctctccaccacctcgggaggacagcaaagctccaagagtgacagagtcgtggccagtaatgttaaagtagagactcagagtgatgaagagaatgggcgtgcctgtgaaatgaatggggaagaatgtgcggaggatttacgaatgcttgatgcctcgggagagaaaatgaatggctcccacagggaccaaggcagctcggctttgtcgggagttggaggcattcgacttcctaacggaaaactaaagtgtgatatctgtgggatcatttgcatcgggcccaatgtgctcatggttcacaaaagaagccacactggagaacggcccttccagtgcaatcagtgcggggcctcattcacccagaagggcaacctgctccggcacatcaagctgcattccggggagaagcccttcaaatgccacctctgcaactacgcctgccgccggagggacgccctcactggccacctgaggacgcactccgttggtaaacctcacaaatgtggatattgtggccgaagctataaacagcgaagctctttagaggaacataaagagcgctgccacaactacttggaaagcatgggccttccgggcacactgtacccagtcattaaagaagaaactaatcacagtgaaatggcagaagacctgtgcaagataggatcagagagatctctcgtgctggacagactagcaagtaacgtcgccaaacgtaagagctctatgcctcagaaatttcttggggacaagggcctgtccgacacgccctacgacagcagcgccagctacgagaaggagaacgaaatgatgaagtcccacgtgatggaccaagccatcaacaacgccatcaactacctgggggccgagtccctgcgcccgctggtgcagacgcccccgggcggttccgaggtggtcccggtcatcagcccgatgtaccagctgcacaagccgctcgcggagggcaccccgcgctccaaccactcggcccaggacagcgccgtggagaacctgctgctgctctccaaggccaagttggtgccctcggagcgcgaggcgtccccgagcaacagctgccaagactccacggacaccgagagcaacaacgaggagcagcgcagcggtctcatctacctgaccaaccacatcgccccgcacgcgcgcaacgggctgtcgctcaaggaggagcaccgcgcctacgacctgctgcgcgccgcctccgagaactcgcaggacgcgctccgcgtggtcagcaccagcggggagcagatgaaggtgtacaagtgcgaacactgccgggtgctcttcctggatcacgtcatgtacaccatccacatgggctgccacggcttccgtgatccttttgagtgcaacatgtgcggctaccacagccaggaccggtacgagttctcgtcgcacataacgcgaggggagcaccgcttccacatgagctaaagccctcccgcgcccccaccccagaccccgagccaccccaggaaaagcacaaggactgccgccttctcgctcccgccagcagcatagactggactggaccagacaatgttgtgtttggatttgtaactgttttttgttttttgtttgagttggttgattggggtttgatttgcttttgaaaagatttttatttttagaggcagggctgcattgggagcatccagaactgctaccttcctagatgtttccccagaccgctggctgagattccctcacctgtcgcttcctagaatccccttctccaaacgattagtctaaattttcagagagaaatagataaaacacgccacagcctgggaaggagcgtgctctaccctgtgctaagcacggggttcgcgcaccaggtgtctttttccagtccccagaagcagagagcacagcccctgctgtgtgggtctgcaggtgagcagacaggacaggtgtgccgccacccaagtgccaagacacagcagggccaacaacctgtgcccaggccagcttcgagctacatgcatctagggcggagaggctgcacttgtgagagaaaatactatttcaagtcatattctgcgtaggaaaatgaattggttggggaaagtcgtgtctgtcagactgccctgggtggagggagacgccgggctagagcctttgggatcgtcctggattcactggctttgcggaggctgctcagatggcctgagcctcccgaggcttgctgccccgtaggaggagactgtcttcccgtgggcatatctggggagccctgttccccgctttttcactcccatacctttaatggcccccaaaatctgtcactacaatttaaacaccagtcccgaaatttggatcttctttctttttgaatctctcaaacggcaacattcctcagaaaccaaagctttatttcaaatctcttccttccctggctggttccatctagtaccagaggcctcttttcctgaagaaatccaatcctagccctcattttaattatgtacatctgtttgtagccacaagcctgaatttctcagtgttggtaagtttctttacctaccctcactatatattattctcgttttaaaacccataaaggagtgatttagaacagtcattaattttcaactcaatgaaatatgtgaagcccagcatctctgttgctaacacacagagctcacctgtttgaaaccaagctttcaaacatgttgaagctctttactgtaaaggcaagccagcatgtgtgtccacacatacataggatggctggctctgcacctgtaggatattggaatgcacagggcaattgagggactgagccagaccttcggagagtaatgccaccagatcccctaggaaagaggaggcaaatggcactgcaggtgagaaccccgcccatccgtgctatgacatggaggcactgaagcccgaggaaggtgtgtggagattctaatcccaacaagcaagggtctccttcaagattaatgctatcaatcattaaggtcattactctcaaccacctaggcaatgaagaatataccatttcaaatatttacagtacttgtcttcaccaacactgtcccaaggtgaaatgaagcaacagagaggaaattgtacataagtacctcagcatttaatccaaacaggggttcttagtctcagcactatgacattttgggctgactacttatttgttaggcgggagctctcctgtgcattgtaggataattagcagtatccctggtggctacccaatagacgccagtagcaccccgaattgacaacccaaactctccagacatcaccaactgtcccctgcgaggagaaatcactcctgggggagaaccactgacccaaatgaattctaaaccaatcaaatgtctgggaagccctccaagaaaaaaaatagaaaagcacttgaagaatattcccaatattcccggtcagcagtatcaaggctgacttgtgttcatgtggagtcattataaattctataaatcaattattccccttcggtcttaaaaatatatttcctcataaacatttgagttttgttgaaaagatggagtttacaaagataccattcttgagtcatggatttctctgctcacagaagggtgtggcatttggaaacgggaataaacaaaattgctgcaccaatgcactgagtgaaggaagagagacagaggatcaagggcttt

SEQ ID NO: 158 - DNA, 14166 bp, Homo sapiens
tccaaactgttcaaaatgatgaacgaagatgcagctcagaaaagcgacagtggagagaagttcaacggcagtagtcagaggagaaaaagacccaagaagtctgacagcaatgcaagcttcctccgtgctgccagagcaggcaacctggacaaagttgtggaatatctgaaggggggcatagacatcaatacctgcaatcagaatggactcaacgctctccatctggctgccaaggaaggccacgtggggctggtgcaggagctgctgggaagagggtcctctgtggattctgccactaagaagggaaataccgctcttcacattgcatctttggctggacaagcagaagttgtcaaagttcttgttaaggaaggagccaatattaatgcacagtctcagaatggctttactcctttatacatggctgcccaagagaatcacattgatgttgtaaaatatttgctggaaaatggagctaatcagagcactgctacagaggatggctttactcctctagctgtggcactccagcaaggacacaaccaggcggtggccatcctcttggagaatgacaccaaagggaaagtgaggctgccagctctgcatattgccgctaggaaagacgacaccaaatctgccgcacttctgcttcagaatgaccacaatgctgacgtacaatccaagatgatggtgaataggacaactgagagtggttttacccctttgcacatagctgcacattacggaaatgtcaacgtggcaactcttcttctaaaccggggagctgctgtggacttcacagccaggaatggaatcactcctctgcatgtggcttccaaaagaggaaatacaaacatggtgaagctcttactggatcgaggcggtcagatcgatgccaaaactagggatgggttgacaccacttcactgtgctgcacgaagtgggcatgaccaagtggtggaacttctgttggaacggggtgcccccttgctggcaaggactaagaatgggctgtctccactacacatggctgcccagggagaccacgtggaatgtgtgaagcacctgttacagcacaaggcacctgttgatgatgtcaccctagactacctgacagccctccacgttgctgcgcactgtggccactaccgtgtaaccaaactccttttagacaagagagccaatccgaacgccagagccctgaatggttttactccactgcacattgcctgcaagaaaaaccgcatcaaagtcatggaactgctggtgaaatatggggcttcaatccaagctataacagagtctggcctcacaccaatacatgtggctgccttcatgggccacttgaacattgtcctccttctgctgcagaacggagcctctccagatgtcactaacattcgtggtgagacggcactacacatggcagcccgagccgggcaggtggaagtggtccgatgcctcctgagaaatggtgcccttgttgatgccagagccagggaggaacagacacctttacatattgcctcccgcctgggtaagacagaaattgtccagctgcttctacaacatatggctcatccagatgcggccactacaaatgggtacacaccactgcacatctctgcccgggagggccaggtggatgtggcatcagtcctattggaagcaggagcagcccactccttagctaccaagaagggttttactcccctgcatgtagcagccaagtatggaagcctggatgtggcaaaacttctcttgcaacgccgtgctgccgcagattctgcagggaagaacggccttaccccgctccatgttgctgctcattatgacaaccagaaggtggcgctgctgttactggagaagggtgcttcccctcatgccactgccaagaatggctatactccgttacatattgctgccaagaagaatcaaatgcagatagcttccacactcctgaactatggagcagagacaaacattgtgacaaagcaaggagtaactccactccatctggcctcgcaggaggggcacacagatatggttaccttgcttctggataagggagccaatatccacatgtcaactaagagtggactcacatccttacaccttgcagcccaggaagataaagtgaatgttgctgatattctcaccaagcatggagctgatcaggatgctcatacaaagcttggttacacacctttaattgtggcctgtcactatggaaatgtgaaaatggtcaactttcttctgaagcagggagcaaatgttaacgcaaaaaccaagaacggctacacgcctttgcaccaggccgctcagcagggtcacacgcacatcatcaacgtcctgctccagcatggggccaagcccaacgccaccactgcgaatggcaacactgccttggcgattgctaagcgtctgggctacatctccgtggtcgacaccctgaaggttgtgactgaggaggtcaccaccaccaccacaactattacagaaaaacacaaactaaatgtacctgagacgatgactgaggttcttgatgtttctgatgaagagggtgatgacacaatgactggtgatgggggagaataccttaggcctgaggacctaaaagaactgggtgatgactcactacccagcagtcagttcctggatggtatgaattacctgcgatacagcttggagggaggacgatctgacagccttcgatccttcagttccgacaggtctcacactctgagccatgcctcctacctgagggacagtgccgtgatggatgactcagttgtgattcccagtcaccaggtgtcaactctagccaaggaggcagaaaggaattcttatcgcctaagctggggcactgagaacttagacaacgtggctctttcttctagtcctattcattcaggtttcctggttagttttatggtggatgcccgaggtggtgctatgcgaggatgcagacacaatgggctccgaatcattattccacctcggaaatgtactgctccaacgcgagtcacctgccgactggtcaagcgccacagactggcaacaatgcctccaatggtggaaggagaaggcctggccagtcgcctgatcgaagttggaccttctggtgctcagttccttggtaaacttcacctgccaacggctcctcccccacttaatgagggagaaagtttggtcagccgcattcttcagctggggcctcctggaaccaaattccttgggcctgtgatcgtggagatccctcactttgcggcccttcgaggaaaggaaagggaactggtggtcctgcgcagtgagaatggggacagctggaaagagcatttctgtgactacactgaagatgaattgaatgaaattcttaacggcatggatgaagtactggatagcccagaagacctagaaaagaaacgaatctgccgcatcatcacccgagacttcccacagtactttgcagtggtgtctcgtatcaaacaggacagcaatctgattggcccagaaggaggtgtactgagcagcacagtggtgccccaggtgcaggccgtcttcccagagggggcactcaccaagcggatccgcgtaggcctgcaggctcaacctatgcacagtgagctggttaagaagatcctaggcaacaaagctaccttcagccctatagtcactttggaacctagaagaagaaaattccacaaaccaattaccatgaccattcctgtccccaaagcttcaagtgatgtcatgttgaatggttttgggggagatgcaccaaccttaagattactatgcagcataacaggtggaaccacccctgcccagtgggaagatattacaggaactacgccattaacatttgtcaatgaatgtgtttcctttacaacaaacgtgtctgccaggttctggctgatagattgtcgacagatccaggaatccgttacttttgcatcacaagtatacagagaaattatctgcgtaccttatatggccaaatttgtagtgtttgccaaatcacatgaccccattgaagccaggttgaggtgtttctgcatgactgatgataaagtggataagacccttgaacaacaagaaaattttgctgaggtggccagaagcagggatgtggaggtgttagaaggaaaacccatctacgttgattgtttcggcaacttggtaccattaactaaaagtggccagcatcatatattcagtttttttgccttcaaagaaaatagacttcctctatttgtcaaggtacgcgatacgactcaggaaccttgcggacgactatcatttatgaaggagccaaaatccacgagaggcctggtgcatcaagctatttgcaacttaaacatcactttgccgatttatacaaaggaatcagagtcagatcaagaacaggaggaagagatcgatatgacatcagaaaaaaatgatgagacagaatctacagaaacatctgtcctgaaaagtcacctggttaatgaagttcctgtcctagcaagtccggacttgctctctgaagtttctgagatgaaacaagatttgatcaaaatgaccgccatcttgaccacagatgtgtctgataaggcaggttctattaaagtgaaggagctggtgaaggctgctgaggaagagccaggagagccttttgaaatcgttgaaagagttaaagaggacttagagaaagtgaatgaaatcctgagaagtggaacctgcacaagagatgaaagcagtgtgcagagctctcggtctgagagaggattagttgaagaggaatgggttattgtcagtgatgaggaaatagaagaggctaggcaaaaagcacctttagaaatcactgaatatccatgtgtagaagttagaatagataaagagatcaaaggaaaagtagagaaagactcaactgggctagtgaactaccttactgatgatctgaatacctgtgtgcctcttcccaaagagcagctgcagacagttcaagataaggcagggaagaaatgtgaggctctggctgttggcaggagctctgaaaaggaagggaaagacatacccccagatgagacacagagtacacagaaacagcacaaaccaagcttgggaataaagaagccagtaagaaggaaattaaaagaaaagcagaaacaaaaagaggaaggtttacaagctagtgcagagaaagctgaacttaaaaaaggtagttcagaagagtcattaggtgaagacccaggtttagcccctgaaccccttcccactgtcaaggccacatctcctttgatagaagaaactcccattggttccataaaggacaaagtaaaggcccttcagaagcgagtggaagatgaacagaaaggtcgaagcaagttgcccatcagagtcaaaggcaaggaggacgtgccaaaaaagaccacccacaggccacatccagctgcgtcaccctctctgaagtcagagagacatgcgccagggtctccctcccctaaaacagaaagacactctactctttcctcttccgcaaaaactgaaaggcaccctccagtatcaccatcaagtaaaactgagaaacactcacctgtgtcaccctctgcaaaaacggaaagacattcacctgcgtcatcatcgagtaaaactgagaaacactcacctgtatcaccctcgacaaaaactgaaaggcactctcctgtgtcatctacaaaaacagaaagacacccacctgtttcgccttcaggcaaaacagacaaacgtccacctgtatcgccctccgggaggacagaaaaacacccgccagtatcgcctgggagaacagaaaaacgcttgcctgtttcaccctccggaagaacggacaagcaccaacctgtatcaacagctgggaaaactgagaagcacctgcctgtgtcaccttctggcaaaacagaaaagcaaccacctgtatcccccacttcaaaaacagagaggattgaggaaaccatgtctgttcgggagctgatgaaggctttccagtcaggtcaggacccttctaaacataaaactggactctttgagcacaaatcagcaaaacaaaagcagccacaagagaaaggtaaagttcgggtagaaaaagaaaaggggccgatactaacccagagagaagctcagaaaacagagaatcagacaatcaaacgaggccagagactcccggtaacgggcacagcagaatccaaaagaggagttcgtgtttcctccataggagttaagaaagaagatgcagctggaggaaaggagaaagttctcagccacaaaatacctgaacctgttcagtcagtgcctgaagaagaaagccacagagagagcgaagtgcccaaagaaaagatggctgatgagcagggagacatggatctacagatcagcccagataggaaaacctccactgacttctctgaggtcattaagcaagagttggaagacaatgacaaataccaacaattccgcctgagtgaggagacagaaaaggcacagcttcacttagaccaagtactcactagtcctttcaacacaacatttccactcgactacatgaaagatgagttccttccagctctgtctttacaaagcggtgctttagatggcagttctgaaagcctaaagaatgagggggtagccggctctccgtgtggcagcctgatggaggggacccctcagattagttcagaagaaagctataagcatgaaggcctagcagagacccctgagacgagcccagaaagcctttctttctcaccaaagaaaagtgaggagcaaactggggaaacaaaggaaagcaccaagacagaaaccaccacagaaattcgttcagaaaaagagcatcccacgaccaaagacattactggtggctctgaagagcgaggtgccacagtcactgaggactcagagacctctactgagagttttcagaaagaggccactctaggctctcccaaagacacaagccctaaaagacaagatgattgcacaggcagctgtagtgtagcattagctaaagagacacctacaggactgactgaggaggcagcctgtgatgaaggtcaacgtacctttggtagttcagcccacaagacacaaactgatagtgaggttcaagaatccacagccacctcagacgagacaaaggccttgccgctgcctgaggcttctgtaaagacagatacaggaactgaatcaaaacctcagggagtcattagaagtccccaagggttagaacttgcactccctagccgagatagcgaagtcctcagcgctgtggctgatgactcattagcagtgagccacaaagactctctggaagccagccctgtgctagaagataactcttcacacaaaacccctgattctctggagccaagtcctctgaaagaatccccttgccgtgactctctggaaagcagccctgttgaaccaaagatgaaggctggaatttttccaagtcactttcctcttcctgcagctgttgccaaaacagaactcttgacggaagtggcctctgtgcggtcccggctactccgagaccctgatggcagtgctgaggatgacagtcttgagcagacatcgctcatggagagctcagggaagagccccctttctcctgacacccccagctctgaagaagtcagctatgaggttacacccaaaaccacagatgtaagtacaccaaaaccagctgtgattcatgaatgtgcagaggaggatgattcagaaaacggggagaaaaagaggttcacacctgaagaggagatgtttaaaatggtaaccaaaatcaaaatgtttgatgaacttgaacaagaagcaaagcagaaaagggactacaaaaaagaacccaaacaagaagaatcttcttcatcttctgacccagatgctgactgttcagtagatgtggatgaaccaaaacatacaggcagtggggaggatgaaagtggtgtccctgtgttagtaacttcggagagcaggaaggtgtcttcctcctcagaaagtgaacctgagttggcacagcttaaaaaaggtgctgactcaggccttttaccagaaccagtgattcgagtacaacctccttctccacttccatcaagcatggactccaattccagtccagaagaagtacaattccagcctgtcgtttccaaacaatatactttcaagatgaatgaagatactcaggaagagccaggcaaatcagaagaagaaaaagattctgaatcccatttagctgaagaccgtcatgctgtttccactgaggctgaagacaggtcttatgataagctaaacagagacactgatcagccaaaaatctgtgatggccatggatgtgaggccatgagtcctagcagctcagctgctcctgtctcttcaggtctacagagtccgactggtgatgatgttgatgaacagccagtcatctataaagaatcattagctctccaaggcactcatgaaaaagacacagagggagaagagcttgatgtttctagagcagaatctccacaagcagattgccccagtgaaagcttttcatcttcatcctctttgcctcattgtttggtatctgaaggaaaagaattagatgaagacatatctgccacatcttctattcaaaaaacagaggtcacaaaaactgatgaaacatttgagaacttaccaaaggactgcccctctcaagactcatccattactactcaaacagatagattttccatggatgttcccgtgtctgacctagctgagaatgatgaaatctatgatccacaaatcactagcccttatgaaaatgtcccttcccaatcttttttctctagtgaagaaagcaaaacccaaacagatgcaaatcacaccacaagttttcactcttctgaagtgtattctgttaccatcacatcccctgttgaagacgttgtagtggcaagctcctctagtggaactgttttaagcaaagaatctaattttgagggccaggacataaaaatggaatcccaacaggaaagtaccttgtgggaaatgcaatcagacagtgtctcttcatctttcgagcctactatgtccgctacaacaacagttgttggtgaacaaataagcaaagtcatcatcacaaaaactgatgtggattctgattcttggagtgaaattcgggaagacgatgaagcctttgaggctcgtgtgaaagaggaagaacaaaagatatttggtttgatggtagacagacaatcacagggtaccacccctgacaccactcctgctaggaccccaactgaagaggggaccccaacaagtgagcaaaacccatttctgtttcaggaaggaaaattgtttgaaatgacccgaagtggtgccattgatatgaccaaaaggtcctatgcagatgaaagttttcactttttccaaattggtcaagaatccagggaagagactctctctgaagatgtgaaagaaggggctactggggctgatcccctaccgctggagacatcagctgaatcactagcactttcagaatcaaaagaaacagtggatgatgaggcagacttacttccagatgacgtgagtgaggaagtagaggaaatacctgcttcggatgctcaacttaactcccaaatggggatttcagcctccactgaaacacctacaaaagaggctgttagtgtagggaccaaggacctccccaccgtgcaaacgggtgatatacctcctctctctggtgtaaagcagatatcctgccccgactcttctgaaccagctgtacaagtccagttagatttttccacactcaccaggtctgtttattcagataggggtgatgattctcccgattcttccccagaagaacagaaatcagtaatcgagattcctactgcacccatggagaatgtgccttttactgaaagcaaatccaaaattcctgtaaggactatgcccacttccaccccagcacctccatctgcagagtatgagagttcagtttctgaagattttctatccagtgtagatgaggaaaataaggcggatgaagcaaaaccaaagtccaaactccctgtcaaagtacccctccaaagagttgaacagcagctctcagatctagacacctctgtccagaagacagtggctcctcagggacaggacatggcaagcatcgcaccagataatagaagcaaatctgaatctgatgctagttctttggattcaaagaccaaatgcccagtaaaaacccgaagttacactgagacagaaacagagagcagagagagggccgaggaacttgagttagaatcagaagaaggggccacaagaccaaagatacttacatcccgattgccagttaagagcagaagcactacatcttcctgcagggggggcacgagccccacaaaagaaagtaaggagcatttctttgacctttacagaaattccatagaattctttgaggagattagtgatgaggcttccaaattagtggataggctgacacagtcagagagggagcaggaaatagtttcagacgatgaaagtagtagtgccctggaagtatcagtaattgaaaatctgccacctgttgagaccgagcactcagttcctgaggacatctttgacacaaggcccatttgggatgagtctattgagactctgattgaacgcatccctgatgaaaatggccatgaccatgctgaagatccacaggatgagcaggaacggatcgaggaaaggctggcttatattgctgatcaccttggcttcagctggacagaattagcaagagaactggatttcactgaggagcaaattcatcaaattcgaattgaaaatcccaactctcttcaagaccagagtcatgcactgttgaagtactggctagagagggatgggaaacatgctacagataccaacctcgttgaatgtctcaccaagatcaaccgaatggatattgttcatctcatggagaccaacacagaacctctccaggagcgcatcagtcatagttatgcagaaattgaacagaccattacactggatcatagtgaagggttctcggtacttcaagaggagttatgcactgcacagcacaagcagaaagaggagcaagctgtttctaaagaaagtgagacctgcgatcaccctcctatcgtctcagaggaagacatttctgttggttattccacttttcaggatggcgtccccaaaactgagggggacagctcagcaacagcactctttccccaaactcacaaggagcaagttcaacaggatttctcagggaaaatgcaagacctgcctgaagagtcatctctggaatatcagcaggaatattttgtgacaactccaggaacagaaacatcagagactcagaaggctatgatagtacccagctctcccagcaagacacctgaggaagttagcacccctgcagaggaggagaagctgtacctccagaccccaacatccagcgagcggggaggctctcccatcatacaagaacccgaagagccctcagagcacagagaggagagctctccgcggaaaaccagcctcgtaatagtggagtctgccgataaccagcctgagacctgtgaaagactcgatgaagatgcagcttttgaaaagggagacgatatgcctgaaatacccccagaaacagtcacagaagaagaatacattgatgagcatggacacaccgtggtaaagaaggttactaggaaaatcattaggcggtatgtatcctctgaaggcacagagaaagaagagattatggtgcagggaatgccacaggaacctgtcaacatcgaggaaggggatggctattccaaagttataaagcgtgttgtattgaagagtgacaccgagcagtcagaggacaacaatgagtaaagccatcacacagaagagggctgtggtgaaggaccagcatggaaaacgcattgacttggagcacctggaggatgtaccagaagcactagaccaggacgacctccagcgcgatctccagcagctccttcggcatttctgcaaggaggacttgaagcaagaggccaagtgaggggctgcccagttctcacaccagaaaccacacattcactcaatatgcagcttcctgtttcagtaggggagtgacctaactggcctaattaatgggataccccgacatttccactgttagcaaatatacggcattttgctttagttttcccccatcctctttaactataaagctaatttgtgaccaaagatggcatccttcatactggatgctgtatccaatactttgttgtgtctgtgctaacctgggaactggccacctccattgttctttgcttctgcacaagatccatgaaaatccattgatcagaagaacttcacctgcagacctcttcaagtgacactatgtaggaatccttccaaggaatatctatgtacaatgtatatagctgaaatgctcagatgaacaacatattaaaattaaaaccactgcctattgtaactacactgggcatcagaataaaaggcctctagaaattgctgaacaatggttaattaagatattgctaacacaatcgagtgataatacagttttactgcaaaagaagcacttcaaacctattatgtccttagaacttccagagtagccactgctcccagttaaaggtgggtcagtagccttgcagaactgtcctgagaagttattgctggtgctggccagccatggcttaggactccaacagccactctgagggaggggagaagggagcagaggccacgcagaatgaaccgatggggtattcagttgctggcagctacattgtgtggcattctagcatcttcaggtctttagatcttggacaagttggcagggtattttaaaagctataactactgtagttttccagttttcattgctgctttagcaaaccacgctgtcttacagtggtactttcttctggccactgcactgtagataattcattggaaacaagatttacccactacataaaaggttaaactccttcagtatgttggagtggtttctttttttttttctttctttcttttttttcttcaggtttatatcttctctaatacctgcatgtggcgtttaaaaatcaagaccacggtcaaacccctcttctaatcacattaattgtttccattctttttaccctgagtgagcacttttcactttccagctaggtctgtttttcagcttgcagacaagattgagaaatccttgaaaatttggttttggttaaaatttttggtttatttatttgaaatccacactcccttggaaactcttaagtgcatttgtgcacttctgtttgtttgtctcaaagaagggactgtaacaatctgagtaatttccatgtcctcttccttattcctctagtggttgaagctgtgtagcattttaacatatatatattcacaaatatattcatataaacagtatacattttgaatcagtcatttgttaaagaaaagtatattcaatgaagatgaaatttaaataaaaaaggacagagtctatcctccagggattgaacattttccaattatctggtcttttcctgttgtgcaaaaatgactcattgctccgaatgtcaaaaacaaatgcgacaaacaatggcacttcatcatttaaagtaatgttgccaagagaaaaaatttcctgggagggaggtttcccacaagccaaatctcctaagcctcaaatgctagcactttttggcagttggataggaaatgagacattctttggcagccaaaataagagaggccgatggtgaaactttttgagacaccctatggccttcttgtcaaaaccttcactggagctcaagaaaagcatttctgttgtgttatttgcagtgcagatgatgtctgtgtaacaacataatggttattcacctttttttgattttgatttttgctgtgttatcaaaaacttgaatactgtgagaagaagtgaattttcagttgacgaatcagcatcttgttcccatggtgataacactaattgaatatatctatgagggcatgtattagttaatggaaaaaaaaatacaacactaacaatacatagctgcaatgtgtacaatggctgatttaattaaataaaatgtacaagtgttaaaaaaaaaaaaaaaaaaa

SEQ ID NO: 159 - DNA, 5581 bp, Homo sapiens
agctcctgtgacagacggagctggagcggcggggcggcggcggagtccggcggccgggagagcgagtgagcgagcggaggagcagcgacacgggagtctagggagcgagaaggagaaggaggggagcgctcgggcgcgagcgagagaaaccgcgagcgccgagcttggactcgagccccggaacggctgaggagcccgcccgctcccctcccctccccctccccgggcccgggcccagcgcgccatcctcccccctccttccctccctccctccttcctccctcccctctccctccccctcccccgccggtggatgggagtgaaggacggaagaggcccggcggaggcggcggtgcagcgctccggtggaatgaatcttacttgttgaatatcttctggttactagttggattcatttgtgaaagaatcattttcccctgtgtggaagacacttagtggcatatttaaattataagtccacggatcaaaaagctttttgatttcccaaaggagggacataccactatatcagataagcttgacattacagccaagatggtgctgtcccagagacaacgagatgaactaaatcgagctatagcagattatcttcgttcaaatggctatgaagaggcatattcagtttttaaaaaggaagctgaattagatgtgaatgaagaattagataaaaagtatgctggtcttttggaaaaaaaatggacatctgttattagattacaaaagaaggttatggaattagaatcaaagctaaatgaagcaaaagaagaatttacgtcaggtggacctcttggtcagaaacgagacccaaaagaatggattccccgtccgccagaaaaatatgcattgagtggtcacaggagtccagtcactcgagtcattttccatcctgtgttcagtgttatggtctctgcttcagaggatgctacaattaaggtgtgggattatgagactggagattttgaacgaactcttaaaggacatacagactctgtacaggacatttcattcgaccacagcggcaagcttctggcttcctgttctgcagatatgaccattaaactatgggattttcagggctttgaatgcatcagaaccatgcacggccatgaccacaatgtttcttcagtagccatcatgcccaatggagatcatatagtgtctgcctcaagggataaaactataaaaatgtgggaagtgcaaactggctactgtgtgaagacattcacaggacacagagaatgggtacgtatggtacggccaaatcaagatggcactctgatagccagctgttccaatgaccagactgtgcgtgtatgggtcgtagcaacaaaggaatgcaaggctgagctccgagagcatgagcatgtggtagaatgcatttcctgggctccagaaagctcatattcctccatctctgaagcaacaggatctgagactaaaaaaagtggtaaacctgggccattcttgctgtctggatccagagacaagactattaagatgtgggatgtcagtactggcatgtgccttatgaccctcgtgggtcatgataactgggtacgtggagttctgttccattctggggggaagtttattttgagttgtgctgatgacaagaccctacgcgtatgggattacaagaacaagcgatgcatgaagaccctcaatgcgcatgaacactttgttacctccttggatttccacaagacggcaccctatgtcgtcactggcagcgtagatcaaacagtaaaagtgtgggagtgccgttgattgtgtctccttcggcccctcctccctcttttcctctggatgcactctgatgataccatggttaccccattgagctctgtttaaataaatattgtcctttcatgtaaattattctggatgtagattgagcttattaaatgttacacacaaagtattcatgcatggtgaatccaaattgtatactgtaaatttacatacgttgtctagaagtaccatagggtttaaaaacctgggctggcattggtcacaccaggcctaagaaggcagaagttgaatcaattgaactagggcactaaactgaatagttgacagtgtcattttatgttggattattaattcctgtttttctttctgctatctgttggtgcctgacttgatggcctcatttggggaaaagtggtggttattagggcttttcctgaaatgtgtatctatgtaacatcacttaagtgtgcttaataaatctcctgtaaggattttagatgataaggctacaattcagaatcttctgaaccatctatgtaatgaatggggattatacattggaatttttgtcatgacacatttgccaaatcagtaggatatatttgttttggcagcctatcacgcagaggctagtggtatatttatgtaagaaaatgactgtaaatctcaagaaaaatctcagcagctaatagcaactcatttatttcattttggtcttaatgctttgtaaacaggtcaaaaaatactgtcatactctaagcttctattttccacactggacatacttctagttgtattctccatactattagactgtgtagtgatgtgacttccaagtagaatttaatctccccattgagtgtgtcatggtacaaatcactattcgtttttggtgttttttagggatgtgcaatgtgcattacataatgacagaaatactgagaaggttctgtgtgcccatttgaaaggagtgggaggaatacagcagtttgtttttcaacatgaatctgatattgatttaaactgtgtttcacttacaagttttaaaaaaatgacagggtttaatggagcgtgcataaaaatgtactgttttcaccttttgtttatatgtaaatgtttgtaagtatatgggcctatctgtaagtgggtaagtctgtatgtgtgtatcatacacatcaacctccatgtccttagtcctgggtttttgaaaaagtgctaaaacggacaagtagaataaatgttgctgtggaatgccatgctttagaacaaaccctttttgatcttaatgcttctgaaaactaggtctgactctggggatttttttccagccgaaggaaaatcacttccgttatgtccccctctaatttagccgctcgacattttacacaacccggatatgttgtatattttgacccaaagttacaggtaggtttaagagaatttttagccatgacttttggagcactattccattgtcagttattaataaagaattccattgcttagctaaccaacaggttttttttgtttccaagagagttatttgaaaagttaacagaacaatgagataacagtgacagtttaacaaagataaaattctgaactgcgttttattcatttgtgtactatgtgattttttaaatgtcccctttagtatttaatggaaaattggttcctgcaaaagacaaagggtgagagttagcgtcctgtagatacacacagagactaggccgtatattaactagaagcagctttatgtctagcttgtgtctttttgtttgtttgcttgtttgtttttagattcctgagagatgtctctggaagggaaagttttgagaactaatggctatttttgaggacaaaaattacatcttaagctaattccttaaatacatacagtaggtgaattttcaggacaatattgcctcacaaccctgcttacattgaaaagtctttttcccttagctcttctgactggatttttctacaaaactatggaaaatatctttgttcttgtttgctgctattttctgtcctattttgagaaatataaatacatagaaatggtgcatcttaacatttgtttgtacatgtataaatgtcttgtattttaattcatttttagcatgaattgtttaagggtaagccacaacatctagaaatcactcatagatattgaacaataaaggagaatggtaccgatgcaggaggaagcaagcgtgtcttcccctgcagcacacagcgacttgcgttgacaaaggaggaggaaacgattactctgtaaacaaagttatccttacttgggagattgccacagcctgctgctgagttgagttaccagacatcctccatgtgagaagcagcgaacattgaatctcagggatggcccacaactgggtccacatgtaatgagccctgtttaataacgaaggggtgggggagagcagtccgtctacaacctggaatcagatttgcaaaatttcctgcactgctgtctgacactgtcctgttgatgccctttctgactgtgttctctgttttctctgtctgctgtctaaccctgtgccttgcctgggataaggacaatgatgaggttactggtttggattgtaagtagaggacttttattaattggtttagaggttcactgctgctttgtcactttctcaatcaaattggccacttaagaaataaagagctggtagaattgcatcctcagatgattattgactgtgtgtgtgtgtgaaaacagacattccagtgccacccaaatatatatctgtaacgtgcccaagaaatcctagctgcgctcttgagagtgcatgccatggagactggtttagacaccgcgtggagcctagttgcctgttgtcacggcatcttgcactttaggagactaagaccgtcctggttcgtctgtgtgtggtgtgaccaatggtgtgcccagagcactactctcaaaatcactagtgttagcaagtcgtcccgggctggggagcgttcgccgtagtctttggaagctttggctttagatttaccaagccccgcctccccgctgccagtgccctgctctcccgttcgcctctttctgtttctgtgtgaactttcccggtaatatcactcgttaaataggttttctttaaacttaattaaggaaaaactatttaaaggtaaaggatattttgttgacatcggtggctcgatcatccttaagcaactgaagttaaaattgttgaaggaaaaggcacttaaattggttactttcatgtccagctgtatataagtccagtgtgttcatctagatgacgcaaagaatctcctggtagagaagcgacatgtaaaaaactggtggaaaaaggttttggattttttttccagtggggtggggggagggcaagctggatttacaggtcacggctggactgaatgggcctttttatcttcccactgtatcatggaagtagctgcttgcttgtactgtccatccttcaggcatccctaaagctcactctgaagatgttagagacaaacacaaactcttcgagttaaagttgatcctgacactgacatgaaggcaagccttgatttcgtatgaacgttgctgaagtggtaattgaggaaaacagttccccagattgttaagagttcactgaagatattgacacaattttaaaaaatcagtaaaggaatgtatataatattgctctcgtgttttacagtaagatttgttgctctcagactgtgtaaaacaaaatttattcatgttttctgcatattaaaaaatcttattgtaccaactggtaaaccg

SEQ ID NO: 160 - DNA, 6085 bp, Homo sapiens; identical to SEQ ID NO: 110

SEQ ID NO: 161 - DNA, 1853 bp, Homo sapiens
cacagggactgcgctcccttgcccctagcgctcccgcgctgctgctccagccgcccggcagctctgaggatggagaggagggcgcggagctcctccagggagtcccgcgggcgaggcggcaggactccgcacaaggagaacaagagggcaaaggccgagaggagcggcgggggccgcgggcgccaggaggctgggcccgagccgtcgggctccggacgggcggggaccccgggggagccccgagcgcccgccgccacggtggtggacgtggatgaggtccgaggctccggcgaggagggcaccgaggtggtggcgctgttggagagcgagcggcccgaggaaggtaccaaatcctccggcttaggggcctgtgagtggcttcttgtcctcatttccctgctcttcatcatcatgaccttccctttttccatctggttctgcgtaaaggttgtacaagagtatgaaagagtaattatattccgactgggacatctgcttcctggaagagccaaaggccctggtcttttcttttttttgccctgcctggatacctaccacaaggttgaccttcgtctccaaactctggagataccttttcatgagatcgtgaccaaagacatgtttataatggagatagatgccatttgctactaccgaatggaaaatgcctctcttctcctaagcagtcttgctcatgtatctaaagctgtgcaattccttgtgcaaaccactatgaagcgtctcctagcacatcgatccctcactgaaattcttctagagaggaagagcatcgcccaagatgcaaaggttgccttggattcagtgacctgtatttggggaatcaaagtggagagaatagaaattaaagatgtgaggttgccagctgggcttcagcactcactggctgtggaggctgaagcgcaaagacaagccaaagtgcggatgattgctgcagaagcggaaaaggctgcttctgagtccctgaggatggcagctgagattctgtcaggcacccctgctgctgttcagcttcgatacctccacacccttcagtctctgtccacagagaagccttccactgtggttttacctttgccatttgacctactgaattgcctgtcttctcccagcaacagaactcagggaagcctccccttcccaagtccttccaaacctgttgagccactaaatcctaaaaagaaagactctcccatgttataggaaggatggggcataatgtgactgtaaaggggcctgccatagaaaagtcacatccctgagggagacactctgtcctcattccctgcccttcctttggttgccatatggaatggccatggaatgcacgaagtcacaatgcaccatccatgagaagacagtgaaatgatgtaatgacagagaaggcagacaacatgtttccgtgactcatctagtcagagcaattatgggaaacagctttggtcaacattctactttggaaagaattttgagtctagatgtggttaaattttgacttctgggaacttggttcagatgtccctttcactgtatgtcctctgacccctttggcaaggttgccacagctcccacagcccttcctacaagcacctatcattgggcttgtcacactctattgctcttctgtcccgaagatgcagtcttctctccaatgatactaccaagtcttagttttcctcaaccacactcaatctttttgctccaccctgaattcctcacacctaaccctgatagttacctaaagtgacacttaaatgtttcagagtgaatgcaaaaaagagagatgtacttggagtcggatatacaatttatccctaattaaagcatttaaaagg

SEQ ID NO: 162 - DNA, 8787 bp, Homo sapiens
ggccgcagctccccggcggaggcaagaggtggttgggggggaccatggctgacgttttcccgggcaacgactccacggcgtctcaggacgtggccaaccgcttcgcccgcaaaggggcgctgaggcagaagaacgtgcacgaggtgaaggaccacaaattcatcgcgcgcttcttcaagcagcccaccttctgcagccactgcaccgacttcatctgggggtttgggaaacaaggcttccagtgccaagtttgctgttttgtggtccacaagaggtgccatgaatttgttactttttcttgtccgggtgcggataagggacccgacactgatgaccccaggagcaagcacaagttcaaaatccacacttacggaagccccaccttctgcgatcactgtgggtcactgctctatggacttatccatcaagggatgaaatgtgacacctgcgatatgaacgttcacaagcaatgcgtcatcaatgtccccagcctctgcggaatggatcacactgagaagagggggcggatttacctaaaggctgaggttgctgatgaaaagctccatgtcacagtacgagatgcaaaaaatctaatccctatggatccaaacgggctttcagatccttatgtgaagctgaaacttattcctgatcccaagaatgaaagcaagcaaaaaaccaaaaccatccgctccacactaaatccgcagtggaatgagtcctttacattcaaattgaaaccttcagacaaagaccgacgactgtctgtagaaatctgggactgggatcgaacaacaaggaatgacttcatgggatccctttcctttggagtttcggagctgatgaagatgccggccagtggatggtacaagttgcttaaccaagaagaaggtgagtactacaacgtacccattccggaaggggacgaggaaggaaacatggaactcaggcagaaattcgagaaagccaaacttggccctgctggcaacaaagtcatcagtccctctgaagacaggaaacaaccttccaacaaccttgaccgagtgaaactcacggacttcaatttcctcatggtgttgggaaaggggagttttggaaaggtgatgcttgccgacaggaagggcacagaagaactgtatgcaatcaaaatcctgaagaaggatgtggtgattcaggatgatgacgtggagtgcaccatggtagaaaagcgagtcttggccctgcttgacaaacccccgttcttgacgcagctgcactcctgcttccagacagtggatcggctgtacttcgtcatggaatatgtcaacggtggggacctcatgtaccacattcagcaagtaggaaaatttaaggaaccacaagcagtattctatgcggcagagatttccatcggattgttctttcttcataaaagaggaatcatttatagggatctgaagttagataacgtcatgttggattcagaaggacatatcaaaattgctgactttgggatgtgcaaggaacacatgatggatggagtcacgaccaggaccttctgtgggactccagattatatcgccccagagataatcgcttatcagccgtatggaaaatctgtggactggtgggcctatggcgtcctgttgtatgaaatgcttgccgggcagcctccatttgatggtgaagatgaagacgagctatttcagtctatcatggagcacaacgtttcctatccaaaatccttgtccaaggaggctgtttctatctgcaaaggactgatgaccaaacacccagccaagcggctgggctgtgggcctgagggggagagggacgtgagagagcatgccttcttccggaggatcgactgggaaaaactggagaacagggagatccagccaccattcaagcccaaagtgtgtggcaaaggagcagagaactttgacaagttcttcacacgaggacagcccgtcttaacaccacctgatcagctggttattgctaacatagaccagtctgattttgaagggttctcgtatgtcaacccccagtttgtgcaccccatcttacagagtgcagtatgaaactcaccagcgagaacaaacacctccccagcccccagccctccccgcagtgggaagtgaatccttaaccctaaaattttaaggccacggccttgtgtctgattccatatggaggcctgaaaattgtagggttattagtccaaatgtgatcaactgttcagggtctctctcttacaaccaagaacattatcttagtggaagatggtacgtcatgctcagtgtccagtttaattctgtagaagttacgtctggctctaggttaacccttcctagaaagcaagcagactgttgccccattttgggtacaatttgatatactttccataccctccatctgtggatttttcagcattggaatcccccaaccagagatgttaaagtgagcctgtcccaggaaacatctccacccaagacgtctttggaatccaagaacaggaagccaagagagtgagcagggagggattgggggtgggggaggcctcaaaataccgactgcgtccattctctgcctccatggaaacagcccctagaatctgaaaggccgggataaacctaatcactgttcccaaacattgacaaatcctaacccaaccatggtccagcagttaccagtttaaacaaaaaaacctcagatgagtgttgggtgaatctgtcatctggtaccctccttggttgataactgtcttgatacttttcattctttgtaagaggccaaatcgtctaaggacgttgctgaacaagcgtgtgaaatcatttcagatcaaggataagccagtgtgtacatatgttcattttaatctctgggagattatttttccatccagggtgccatcagtaatcatgccactactcaccagtgttgttcgccaacacccacccccacacacaccaacattttgctgcctaccttgttatccttctcaagaagctgaagtgtacgccctctccccttttgtgcttatttatttaataggctgcagtgtcgcttatgaaagtacgatgtacagtaacttaatggaagtgctgactctagcatcagcctctaccgattgattttcctcccttctctagccctggatgtccacttagggataaaaagaatatggttttggttcccatttctagttcacgttgaatgacaggcctggagctgtagaatcaggaaacccggatgcctaacagctcaaagatgttttgttaatagaaggattttaatacgttttgcaaatgcatcatgcaatgaattttgcatgtttataataaaccttaataacaagtgaatctatattattgatataatcgtatcaagtataaagagagtattataataattttataagacacaattgtgctctatttgtgcaggttcttgtttctaatcctcttttctaattaagttttagctgaatcccttgcttctgtgctttccctccctgcacatgggcactgtatcagatagattactttttaaatgtagataaaatttcaaaaatgaatggctagtttacgtgatagattaggctcttactacatatgtgtgtgtatatatatgtatttgattctacctgcaaacaaatttttattggtgaggactatttttgagctgacactccctcttagtttcttcatgtcacctttcgtcctggttcctccgccactcttcctcttggggacaacaggaagtgtctgattccagtctgcctagtacgttggtacacacgtggcattgccgcagcacctgggctgacctttgtgtgtgcgtgtgtgtgtgtttccttcttcccttcagcctgtgactgttgctgactccaggggtgggagggatggggagactcccctcttgctgtgtgtactggacacgcaggaagcatgctgtcttgctgcctctgcaacgacctgtcgtttgctccagcatgcacaaacttcgtgagaccaacacagccgtgccctgcaggcaccagcacgtgcttttcagaggctgcggactttcttccagccattgtggcattggcctttccagtcttgggaggagcgcgctgctttggtgagacacccccatgcaaggtcctcagagtagccgggttctaccacaaacagaaacagaatgaaagtagctgtcagtccttgtagagagccgctctgtttcctcccagaagcatctcccagctaagctcgcattatttttctcctctggctgtttgcctgaagttcacagaacacacaaccatgaaaggctttttgaggtgagaggcccaggtggtcctggcaaccctgagtagaaggagagacggggtagggaacgggcccggccagaaaagaaccatttcttctgccatcttttatgcaccatagacatcgagactccagggggtcctggctcccctgtccctgcagccctgcaggtcagtgcatgatctgggttcgtgtcctgaccaggtgctcctcctttgatccgaggggaaagggactggtttatagaaagagcctaggagacaaaagggccagtccccctgcccagaatggagcagcagcaggacagacccccacgaggccccccagagaggaggaagatcccacggaggaacacatgaggttagggacccttgttcagcaccccaaacagcctgcctgtttaaagcaggcagcaggcttaggccttccctgcaaccccaacacccacaagtttgtttctctaggaaacacattcactgtctcagctggctgttactctctcagaccatatggcaaagttttccaagaaaatgccccgacaggggtgcccagcacactgcctgagggacaacagacatcagaacaaacccccagagagaaacagtcaaaatcagggcccggtgcagtgttgtcatgtggaacctgctttatccattgctgagtgttgaatgtgggtaatggttagggctttccagatctcagcagccaaagacagttattgttggaagactgtcatgtagataaccatgagcaatggctcgcctcagaatcagttcataaaattctatggtactggccccttcgtgggtattgtgtgaaatgagatggtggcgaggggtgcgctgtggaactgccgcagccacgcaggaggtccctgggggatgctttgggaagtccttgcccctgagcactgcctgattgccagggcctgtggaggtctaggccgcctggcagaatctagcaccgtccgaatccccgcaggacccatggagctatgaccacaccaggccattcaaatggctctgcattatcttcccttggaaggtggccactcctcggtggcagggcctttccctgaggctgcaggccgtgggctggcagcccgtctcttggcatttcaattgaaggtcaccaggtgctgggtttgaaaggaagtcactggagtgctgccaggggccgccctccaaggttaatgagaggcccacatccaggcaagaactaattcaaaaggcagatcagaaaccacaggagtcaaaattattgctccggcagtgcttcccttcctttcatccactggcctcgtgtggtccatgcagggccactgtctgccctttctgatgccacgtattaggctttcttactcagaattttgatagaaaaccatggggccaagagctctggaagcctggccggaaagaccaaggttcatgcagcccaacaaatgattgttgagcacctctcggagccaaagtccttaggcgagtgtggtgacttcctggaaggaggatgcagacttccagagagcccccccaacggacgtgctgagaagggagagggaggcgggggctgtagtcaggaaggagccagagaagaacagggtttgggtgcatccagaaatatgcctgcagtaggagggagaggaaggggtgccaccgtcaacggcttcccatcggaggtggttggtgcagatggaagtttctgtctgctggccctcaagagagtgttttgccagggacacagtctgttcctcctcagaaaacaccccccaaatgctaacaacatccccaccagctgctagaagcccctttcccctccccaccttgaagtagctcatagttctctgggcagagccagaccatccagtgtaccccagaggccagtaggttcctgcccattttcctctctggcttcctgccaagaattatggcagctgaggatgaatggagaagtaaaaacaactaacaccgcacaactaacaactaacaccgcagttcccacctgggttccacttagcaggagacatttcggagggttttttttgtttttgttcctgttttttttttttttgctggaatttgttttctcagtactgaaaagagaaaaagtgacaatcttgtatttttaaaagcctcggaaaggtgataccatctgacagtcattttctcacgttggtcttctaaagtcacctatttcttgtgtgtgcacatcacaccatttcctgtttctttataacccgacaagggtaggagtgcctgtttcccctgctgggcacaccagacaatcgtaatcacaaaacagacactgagccaggggcccaaagggtgtgatcatgagagttaccgggacagcagtaggcatgacagtcaccaggaaggacaagggtgctctgttgttagtggccacacaccaatttgacaaggagtgttgcgaaatttttatttatttatttatttattttgagatggagtttcactcttgttgcccaggctggagtgcggtggtacaatctcggctcactgcaacctccacctcccaggttcaagcgattctcctgcctcagcctcccaagtacctgggactacaggtgcgtgccaccacacccagctaaattttgtgtttttagtagagatggggtttcaccatgttggccaggatggtcttgaacccctgacctcatgatctgcctgcctcggcctcccaaagtgctgggattacaggcatgagccaccacgcccagccaaaatatttttttaaagtcattttccttaagctgcttgggctacatgtgaaatacactggacggtcaacattcctgtctcctcccatttgggctgatgcagcagatccagggaatgttacctgtttctgctgctagaagatccaggaaattgggaaggttacctgacgcacacatggatgaaggccatcatctagaaatggggtcaaccacaattgtgttaattccgtagtgtcagggattcttcgggaaggtcaacagtatgaaggattctgacccctgtgcctcccatttatgtgatcaggtgacagttaataaccgtggaggtcacactcagccatccaacagccttacagtgaccctacacaaaagcccccaaattccaaagactttttcttaacctaaaggaagaaattatttgttaattccagtagagcaactgaatatactgggctatttgtacttttttatagagaactttaataataattctttaaaaatgagtttttagaacaaagcaactgacgatttcctaagattccaatgccctggagcttgtaggaggacttagcctgggtcagctggagcacccccgacctgatctcccactgccagattttcccatgctcctagggtatggagtccacgtgggaatgactgcaagttcaggtggaacttggccgactgatgctctgcgagtttttaatagacactggggacaactgcttaaggtttagaaacttccaaaccacaggaaagacatttttagtgtcccccatccagaggcagccctggaataggattcccaggggtttctgggacccctttccttgctccgtgaggctctgtggccatcttttggcaggaggaggatgcttccttggctctgtgcccagacccgcctggtccccaggtctctcaccttgggtgaagattcagagatgccctgtaaggattttgcccactgggcaactcagaaatacttcgatctcccaagatataagaggcagcagcaaacgtgcctattgacgtctgtttcatagttaccacttacgcgagtagacagaactcggcttttcagaaaataggtgtcaagtccactttataagaacctttttttctaaaataagataaaaggtggctttgcattttctgattaaacgactgtgtctttgtcacctctgcttaactttaggagtatccattcctgtgattgtagacttttgttgatattcttcctggaagaatatcattcttttcttgaagggttggtttactagaatattcaaaatcaatcatgaaggcagttactattttgagtctaaaggttttctaaaaattaacctcacatcccttctgttagggtctttcagaatatcttttataaacagaagcatttgaagtcattgcttttgctacatgatttgtgtgtgtgaaggacataccacgtttaaatcattaattgaaaaacatcatataagccccaactttgtttggaggaagagacggaggttgaggtttttccttctgtataagcacctactgacaaaatgtagaggccattcaaccgtcaaacaccatttggttatatcgcagaggagacggatgtgtaaattactgcattgctttttttttcagtttgtataacctctaatctccgtttgcatgatacgctttgttagaaacattaattgtagtttggaagcaagtgtgtatgaataaagataatgatcattccaaaaaaaaaaaaaaaaa

SEQ ID NO: 163 - DNA, 3172 bp, Homo sapiens
gtaagggcacccaccaggtgtaattgtgggcgagcggccgcttcggagctgacactaagcatgtgcagatcaagtccagaagcgccggggttcctcgaagcagttttcaggacttaaggctctgggacatccagcacagtgagcggcccctgggcaccaccagaaaacatttgtgggtgaacgtggagtgatgaccatgtggacactgtctttccagggtttcttggagcctctgcagagtctgggggccaggcttcttagtggaaactgcaggatcttccttctgacccctgcttgcctcgccccagcagctccggttgagtccacagatgccagctcagcttccagcttggggaagagtggggttgtcagcaggagagcctgagggctgaggcccagcgtgaacatggcagctaatggggactctcccccatggtccccggccctggctgcagagggacgtggcagctcatgtgaggcttcagtgtcatttgaggacgtgactgtggacttcagcaaggaggagtggcagcacttggaccctgcccagagacgcctgtactgggatgtgacactagagaactacagccacctgctctcagtggggtaccaaattcccaagtcagaggctgccttcaagttggagcaaggagaggggccatggatgctggagggggaagccccacatcagagctgttcaggtgaggctattgggaaaatgcagcaacagggaattcctggaggaattttcttccactgtgagagatttgatcaacccataggagaagattcattatgttctattttagaagaactgtggcaagataatgaccagctagagcaacgtcaggaaaaccagaataaccttttaagtcatgtgaaagtattgattaaggagaggggctatgaacataaaaacattgaaaaaataattcatgtgactaccaagcttgttccttcaattaaaagactccataactgtgacacaattttgaagcatactttaaactcacataatcataatagaaacagtgcaacaaagaaccttggcaagatttttggaaatggtaacaatttcccccatagcccttcctctactaagaatgagaatgctaaaacaggagcaaattcctgtgaacatgaccactatgaaaaacatctcagccacaaacaagctcccacccaccatcagaaaattcatcctgaggagaagctttatgtgtgtactgaatgtgtaatgggcttcactcagaagtcacatctgtttgagcatcagagaattcatgctggagaaaagtcccgtgaatgtgacaaaagcaacaaagtcttcccccagaaaccccaggttgatgtacatccaagtgtttatacaggagaaaaaccctatctgtgtactcaatgtgggaaagtctttaccctcaaatcaaacctcattacacatcaaaaaattcataccgggcagaaaccctacaaatgcagtgaatgtggaaaagcctttttccagagatcagacctctttagacatctgagaattcatacaggagaaaaaccttatgaatgcagtgaatgtggaaaaggcttctcccagaactcagacctcagtatacatcagaaaactcataccggagagaaacactatgaatgcaatgaatgtgggaaggctttcacaagaaaatcagcactcaggatgcatcagagaatccacacgggagagaaaccttatgtatgcgctgactgtgggaaggccttcatccagaaatcacatttcaacacacatcagagaattcatactggagaaaagccgtatgaatgcagtgactgtgggaaatccttcactaagaagtcacaactccatgtgcatcaaagaattcacaccggagagaaaccctatatatgtacagaatgtggaaaggtcttcactcacaggacaaacctcaccacacatcagaaaactcatactggggaaaaaccctatatgtgtgctgaatgtggaaaggcttttactgaccagtcaaatctcattaaacaccagaaaactcacactggagagaaaccctataagtgcaatggctgtggaaaagccttcatatggaagtcgcgcctcaaaatacatcagaaatctcatattggagagagacactatgaatgcaaggactgcgggaaagccttcatccagaaatcaacactaagcgtgcatcagagaatccatacaggagagaaaccgtacgtttgtcctgaatgcgggaaggcctttatccagaaatcgcacttcattgcgcatcatagaatccatactggagagaagccttatgaatgcagcgactgtgggaaatgcttcactaagaagtcacaactccgtgtgcatcagaaaatccacacaggtgagaagcccaatatatgtgctgaatgtggaaaggccttcactgaccgatcaaatctcataacacatcagaaaatccacactagggagaaaccctatgaatgtggtgactgcgggaaaaccttcacctggaagtcacgcctcaatatacatcagaagtctcatactggagaaagacactatgaatgtagtaaatgtgggaaagctttcatccagaaagccacactaagtatgcatcagataattcatacaggaaagaaaccttatgcttgtacagaatgtcagaaggcctttactgacagatcgaatctcattaaacaccagaaaatgcatagtggagaaaaacgctataaagccagtgactgagaaagtcttcacctggaaatcacaactgggtatgcatcaggtatctaatagcagggaggaggaaggcctgttgctgcaatcattgtacagggggaaatgggtatgagagactgaggcttgagtgaactgaaggcaaacagagccaagtatccttcagtccactggaaagacaagttcctgcatcaccacagtgtatatgcaattctatgcataggaagagcctttagagaaagcatttgagcgaaagtcatgtttggtgacatgattcatacagacctcttgagctcctggaaatagtagaattaagacctgaggagatgactcgtcatctcttatgcttcactttttggataaagaactttttaaattcagtactgattggttcagcatatcctgggacataaaaatactcactactgggaaaaa

SEQ ID NO: 164 - DNA, 8458 bp, Homo sapiens
gctggcccgggagggggcgcggggcacggttgatgccggcccaggatggatcagacctgtgaactacccagaagaaattgtctgctgcccttttccaatccagtgaatttagatgcccctgaagacaaggacagccctttcggtaatggtcaatccaatttttctgagccacttaatgggtgtactatgcagttatcgactgtcagtggaacatcccaaaatgcttatggacaagattctccatcttgttacattccactgcggagactacaggatttggcctccatgatcaatgtagagtatttaaatgggtctgctgatggatcagaatcctttcaagaccctgaaaaaagtgattcaagagctcagacgccaattgtttgcacttccttgagtcctggtggtcctacagcacttgctatgaaacaggaaccctcttgtaataactcccctgaactccaggtaaaagtaacaaagactatcaagaatggctttctgcactttgagaattttacttgtgtggacgatgcagatgtagattctgaaatggacccagaacagccagtcacagaggatgagagtatagaggagatctttgaggaaactcagaccaatgccacctgcaattatgagactaaatcagagaatggtgtaaaagtggccatgggaagtgaacaagacagcacaccagagagtagacacggtgcagtcaaatcgccattcttgccattagctcctcagactgaaacacagaaaaataagcaaagaaatgaagtggacggcagcaatgaaaaagcagcccttctcccagcccccttttcactaggagacacaaacattacaatagaagagcaattaaactcaataaatttatcttttcaggatgatccagattccagtaccagtacattaggaaacatgctagaattacctggaacttcatcatcatctacttcacaggaattgccattttgtcaacctaagaaaaagtctacgccactgaagtatgaagttggagatctcatctgggcaaaattcaagagacgcccatggtggccctgcaggatttgttctgatccgttgattaacacacattcaaaaatgaaagtttccaaccggaggccctatcggcagtactacgtggaggcttttggagatccttctgagagagcctgggtggctggaaaagcaatcgtcatgtttgaaggcagacatcaattcgaagagctacctgtccttaggagaagagggaaacagaaagaaaaaggatataggcataaggttcctcagaaaattttgagtaaatgggaagccagtgttggacttgcagaacagtatgatgttcccaaggggtcaaagaaccgaaaatgtattcctggttcaatcaagttggacagtgaagaagatatgccatttgaagactgcacaaatgatcctgagtcagaacatgacctgttgcttaatggctgtttgaaatcactggcttttgattctgaacattctgcagatgagaaggaaaagccttgcgctaaatctcgagccagaaagagctctgataatccaaaaaggactagtgtgaaaaagggccacatacaatttgaagcacataaagatgaacggaggggaaagattccagagaaccttggcctaaactttatctctggggatatatctgatacgcaggcctctaatgaactttccaggatagcaaatagcctcacagggtccaacactgccccaggaagttttctgttttcttcctgtggaaaaaacactgcaaagaaagaatttgagacttcaaatggtgactctttattgggcttgcctgagggtgctttgatctcaaagtgttctcgagagaagaataaaccccaacgaagcctggtgtgtggttcaaaagtgaagctctgctatattggagcaggtgatgaggaaaagcgaagtgattccattagtatctgtaccacttctgatgatggaagcagtgacctggatcccatagaacacagctcagagtctgataacagtgtccttgaaattccagatgctttcgatagaacagagaacatgttatctatgcagaaaaatgaaaagataaagtattctaggtttgctgccacaaacactagggtaaaagcaaaacagaagcctctcattagtaactcacatacagaccacttaatgggttgtactaagagtgcagagcctggaaccgagacgtctcaggttaatctctctgatctgaaggcatctactcttgttcacaaaccccagtcagattttacaaatgatgctctctctccaaaattcaacctgtcatcaagcatatccagtgagaactcgttaataaagggtggggcagcaaatcaagctctattacattcgaaaagcaaacagcccaagttccgaagtataaagtgcaaacacaaagaaaatccagttatggcagaacccccagttataaatgaggagtgcagtttgaaatgctgctcttctgataccaaaggctctcctttggccagcatttctaaaagtgggaaagtggatggtctaaaactactgaacaatatgcatgagaaaaccagggattcaagtgacatagaaacagcagtggtgaaacatgttttatccgagttgaaggaactctcttacagatccttaggtgaggatgtcagtgactctggaacatcaaagccatcaaaaccattacttttctcttctgcttctagtcagaatcacatacctattgaaccagactacaaattcagtacattgctaatgatgttgaaagatatgcatgatagtaagacgaaggagcagcggttgatgactgctcaaaacctggtctcttaccggagtcctggtcgtggggactgttctactaatagtcctgtaggagtctctaaggttttggtttcaggaggctccacacacaattcagagaaaaagggagatggcactcagaactccgccaatcctagccctagtgggggtgactctgcattatctggcgagttgtctgcttccctacctggcttactgtccgacaagagagacctccctgcttctggtaaaagtcgttcagactgtgttactaggcgcaactgtggacgatcaaagccttcatccaaattgcgagatgctttttcagcccaaatggtaaagaacacagtgaaccgtaaagccttaaagaccgagcgcaaaagaaaactgaatcagcttccaagtgtgactcttgatgctgtactgcagggagaccgagaacgtggaggttcattgagaggtggggcagaagatcctagtaaagaggatccccttcagataatgggccacttaacaagtgaagatggtgaccatttttctgatgtgcatttcgatagcaaggttaagcaatctgatcctggtaaaatttctgaaaaaggactctcttttgaaaacggaaaaggcccagagctggactctgtaatgaacagtgagaatgatgaactcaatggtgtaaatcaagtggtgcctaaaaagcggtggcagcgtttaaaccaaaggcgcactaaacctcgtaagcgcatgaacagatttaaagagaaagaaaactctgagtgtgcctttagggtcttacttcctagtgaccctgtgcaggaggggcgggatgagtttccagagcatagaactccttcagcaagcatacttgaggaaccactgacagagcaaaatcatgctgactgcttagattcagctgggccacggttaaatgtttgtgataaatccagtgccagcattggtgacatggaaaaggagccaggaattcccagtttgacaccacaggctgagctccctgaaccagctgtgcggtcagagaagaaacgccttaggaagccaagcaagtggcttttggaatatacagaagaatatgatcagatatttgctcctaagaaaaaacaaaagaaggtacaggagcaggtgcacaaggtaagttcccgctgtgaagaggaaagccttctagcccgaggtcgatctagtgctcagaacaagcaggtggacgagaattctttgatttcaaccaaagaagagcctccagttcttgaaagggaggctccgtttttggagggccccttggctcagtcagaacttggaggtggacatgctgagttgccgcagctgaccttgtctgtgcctgtggctccggaagtctctccacggcctgcccttgagtctgaggaattgctagttaaaacgccaggaaattatgaaagtaaacgtcaaagaaaaccaactaagaaacttcttgaatccaatgatttagaccctggatttatgcccaagaagggggaccttggcctttctaaaaagtgctatgaagctggtcacctggagaatggcataactgaatcttgtgccacatcttattcaaaagattttggtggaggcactaccaagatatttgacaagccaaggaagcgaaaacgacagaggcatgctgcagccaagatgcagtgtaaaaaagtgaaaaatgatgactcgtcaaaagagattccaggctcagagggagaactaatgcctcacaggacggccacaagccccaaggagactgttgaggaaggtgtagaacacgatcccgggatgcctgcctctaaaaaaatgcagggtgaacgcggtggaggagctgcactcaaggagaatgtctgtcagaattgtgaaaaattgggtgagctgctgttatgtgaggctcagtgctgtggggctttccacctggagtgccttggattgactgagatgccaagaggaaaatttatctgcaatgaatgtcgcacaggaatccatacctgttttgtatgtaagcagagtggggaagatgttaaaaggtgccttctacccttgtgtggaaagttttaccatgaagagtgtgtccagaagtacccacccactgttatgcagaacaagggcttccggtgctccctccacatctgtataacctgtcatgctgctaatccagccaatgtttctgcatctaaaggtcggttgatgcgctgtgtccgctgtcctgtggcataccacgccaatgacttttgcctggctgctgggtcaaagatccttgcatctaatagtatcatctgccctaatcactttacccctaggcggggctgccgaaatcatgagcatgttaatgttagctggtgctttgtgtgctcagaaggaggcagccttctgtgctgtgattcttgccctgctgcttttcatcgtgaatgcctgaacattgatatccctgaaggaaactggtattgcaatgactgtaaagcaggcaaaaagccacactacagggagattgtctgggtaaaagttggacgatacaggtggtggccagctgagatctgccatcctcgagctgttccttccaacattgataagatgagacatgatgtgggagagttcccagtcctcttttttggatctaatgactatttgtggactcaccaggcccgagtcttcccttacatggagggtgacgtgagcagcaaggataagatgggcaaaggagtggatgggacatataaaaaagctcttcaggaagctgcagcaaggtttgaggaattaaaggcccaaaaagagctaagacagctgcaggaagaccgaaagaatgacaagaagccaccaccttataaacatataaaggtaaaccgtcctattggcagggtacagatcttcactgcagacttatctgaaataccccgttgcaactgtaaagctactgatgagaacccctgtgggatagactctgaatgcatcaaccgcatgctgctctatgagtgccaccccacagtgtgtcctgccggagggcgctgtcaaaaccagtgcttttccaagcgccaatatccagaggttgaaattttccgcacattacagcggggttggggtctacggacaaaaacagatattaaaaagggtgaatttgtgaatgagtatgtgggtgagcttatagatgaagaagaatgcagagctcgaattcgctatgctcaagaacatgatatcactaatttctatatgctcaccctagacaaagaccgaatcattgatgctggtcccaaaggaaactatgctcggttcatgaatcattgctgccagcccaactgtgaaacacagaagtggtctgtgaatggagatacccgtgtaggcctttttgcactaagtgacattaaagcaggcactgaacttaccttcaactacaacctagaatgtcttgggaatggaaagactgtttgcaaatgtggagccccgaactgcagtggcttcttgggtgtaaggccaaagaatcaacccattgccacggaagaaaagtcaaagaaattcaagaagaagcaacagggaaagcgcaggacccagggtgaaatcacaaaggagcgagaagatgagtgttttagttgtggggatgctggccagctcgtctcctgcaagaaaccaggctgcccaaaagtttaccacgcagactgtctcaatctgaccaagcgaccagcagggaaatgggaatgtccgtggcatcagtgtgacatctgcgggaaggaagcagcctccttctgtgagatgtgccccagctccttttgtaagcagcatcgagaagggatgcttttcatttccaaactggatgggcgtctgtcttgtactgagcatgacccctgtgggcccaatcctctggaacctggggagatccgtgagtatgtgcctcccccagtaccgctgcctccagggccaagcactcacctggcagagcaatcaacaggaatggctgctcaggcacccaaaatgtcagataaacctcctgctgacaccaaccagatgctgtcgctctccaaaaaagctctggcagggacttgtcagaggccactgctacctgaaagacctcttgagagaactgactccaggccccagcctttagataaggtcagagacctcgctgggtcagggaccaaatcccaatccttggtttccagccagaggccactggacaggccaccagcagtggcaggaccaagaccccagctaagcgacaaaccctctccagtgaccagcccaagctcctcaccctcagtcaggtcccaaccactggaaagacctctggggacggctgacccaaggctggataaatccataggtgctgccagcccaaggccccagtcactggagaaaacctcagttcccactggcctgagacttccgccgccagacagactgctcattactagcagtcccaaaccccagacttcagacaggcctactgacaaaccccatgcctctttgtcccagagactcccacctcctgagaaagtactatcagctgtggtccagacccttgtagctaaagaaaaagcactgaggcctgtggaccagaatactcagtcaaaaaatagagctgctttggtgatggatctcatagacctaactcctcgccagaaggagcgggcagcttcacctcatcaggtcacaccacaggctgatgagaagatgccagtgttggagtcaagttcatggcctgccagcaaaggtctggggcatatgccgagagctgttgagaaaggctgtgtgtcagatcctcttcagacatctgggaaagcagcagccccttcagaggacccctggcaagctgttaaatcactcacccaggccagacttctttctcagcctcctgccaaggcctttttatatgagccaacaactcaggcctcaggaagagcttctgcaggggctgagcagaccccagggcctcttagccaatccccgggcctggtgaagcaggcgaagcagatggtcggaggccagcaactacctgcacttgccgccaagagtgggcaatcttttaggtctctcgggaaggccccagcctccctccccactgaagaaaagaagttggtaaccacagagcaaagtccctgggccctgggaaaagcctcatcacgggcagggctctggcccatagtggctggacagacactggcacagtcttgctggtctgctgggagcacacagacattggcacagacttgctggtctcttggaagagggcaagaccccaaaccagagcaaaatacacttccagctcttaaccaggctccttccagtcacaagtgtgcagaatcagaacagaagtagtaccaatcaatgtcacatgaacaaacaagctgcccccagggtaccatttggggaggggaaatcttttctttctttcccccttaaaaaaaaacacatctgccccgaacactttcccactgttattctttcctcatatcccaacactcagaactcttgtgacattagccagtgggggcttatggttgtgtgaaccatgtatgaaaatccagtgggccccaaccaaggagacagacagacttgggtctctttcccccaacttttccacatggtcatcgtgaaataaaaagtccactctggagtcaaaaaaaaaaaaaaaaaaaaa

SEQ ID NO: 165 - DNA, 800 bp, Homo sapiens
accaccatgaatccactcctgatccttacctttgtggcagctgctcttgctgccccctttgatgatgatgacaagatcgttgggggctacaactgtgaggagaattctgtcccctaccaggtgtccctgaattctggctaccacttctgtggtggctccctcatcaacgaacagtgggtggtatcagcaggccactgctacaagtcccgcatccaggtgagactgggagagcacaacatcgaagtcctggaggggaatgagcagttcatcaatgcagccaagatcatccgccacccccaatacgacaggaagactctgaacaatgacatcatgttaatcaagctctcctcacgtgcagtaatcaacgcccgcgtgtccaccatctctctgcccaccgcccctccagccactggcacgaagtgcctcatctctggctggggcaacactgcgagctctggcgccgactacccagacgagctgcagtgcctggacgctcctgtgctgagccaggctaagtgtgaagcctcctaccctggaaagattaccagcaacatgttctgtgtgggcttccttgagggaggcaaggattcatgtcagggtgattctggtggccctgtggtctgcaatggacagctccaaggagttgtctcctggggtgatggctgtgcccagaagaacaagcctggagtctacaccaaggtctacaactatgtgaaatggattaagaacaccatagctgccaatagctaaagcccccagtatctcttcagtctctataccaataaagtgaccctgttctc

SEQ ID NO: 166 - DNA, 3399 bp, Homo sapiens
cggcgacggcgtcctcaggagctgtggggtcccctgctagaagtgggggactcggcgggggagtcatttaatacttcatgattagaacaaatatgtgaaagttcccaccaaccagtgagaatttcttccttcagacggttttggatcttactgcacagctttctgagaagttcttttggtgccatgttttgtggcttgcatcaaaagaggagtttgtcttcatgaagattcctaacattggtaatgtgatgaataaatttgagatccttggggttgtaggtgaaggagcctatggagttgtacttaaatgcagacacaaggaaacacatgaaattgtggcgatcaagaaattcaaggacagtgaagaaaatgaagaagtcaaagaaacgactttacgagagcttaaaatgcttcggactctcaagcaggaaaacattgtggagttgaaggaagcatttcgtcggaggggaaagttgtacttggtgtttgagtatgttgaaaaaaatatgctcgaattgctggaagaaatgccaaatggagttccacctgagaaagtaaaaagctacatctatcagctaatcaaggctattcactggtgccataagaatgatattgtccatcgagatataaaaccagaaaatctcttaatcagccacaatgatgtcctaaaactgtgtgactttggttttgctcgtaatctgtcagaaggcaataatgctaattacacagagtacgttgccaccagatggtatcggtccccagaactcttacttggcgctccctatggaaagtccgtggacatgtggtcggtgggctgtattcttggggagcttagcgatggacagcctttatttcctggagaaagtgaaattgaccaactttttactattcagaaggtgctaggaccacttccatctgagcagatgaagcttttctacagtaatcctcgcttccatgggctccggtttccagctgttaaccatcctcagtccttggaaagaagataccttggaattttgaatagtgttctacttgacctaatgaagaatttactgaagttggacccagctgacagatacttgacagaacagtgtttgaatcaccctacatttcaaacccagagacttctggatcgttctccttcaaggtcagcaaaaagaaaaccttaccatgtggaaagcagcacattgtctaatagaaaccaagccggcaaaagtactgctttgcagtctcaccacagatctaacagcaaggacatccagaacctgagtgtaggcctgccccgggctgacgaaggtctccctgccaatgaaagcttcctaaatggaaaccttgctggagctagtcttagtccactgcacaccaaaacctaccaagcaagcagccagcctgggtctaccagcaaagatctcaccaacaacaacataccacaccttcttagcccaaaagaagccaagtcaaaaacagagtttgattttaatattgacccaaagccttcagaaggcccagggacaaagtacctcaagtcaaacagcagatctcagcagaaccgccactcattcatggaaagctctcaaagcaaagctgggacactgcagcccaatgaaaagcagagtcggcatagctatattgacacaattccccagtcctctaggagtccctcctacaggaccaaggccaaaagccatggggcactgagtgactccaagtctgtgagcaacctttctgaagccagggcccaaattgcggagcccagtaccagtaggtacttcccatctagctgcttagacttgaattctcccaccagcccaacccccaccagacacagtgacacgagaactttgctcagcccttctggaagaaataaccgaaatgagggaacgctggactcacgtcgaaccacaaccagacattctaagacgatggaggaattgaagctgccggagcacatggacagtagccattcccattcactgtctgcacctcacgaatctttttcttatggactgggctacaccagccccttttcttcccagcaacgtcctcataggcattctatgtatgtgacccgtgacaaagtgagagccaagggcttggatggaagcttgagcatagggcaagggatggcagctagagccaacagcctgcaactcttgtcaccccagcctggagaacagctccctccagagatgactgtggcaagatcttcggtcaaagagacctccagagaaggcacctcttccttccatacacgccagaagtctgagggtggagtgtatcatgacccacactctgatgatggcacagcccccaaagaaaatagacacctatacaatgatcctgtgccaaggagagttggtagcttttacagagtgccatctccacgtccagacaattctttccatgaaaataatgtgtcaactagagtttcttctctaccatcagagagcagttctggaaccaaccactcaaaaagacaaccagcattcgatccatggaaaagtcctgaaaatattagtcattcagagcaactcaaggaaaaagagaagcaaggatttttcaggtcaatgaaaaagaaaaagaagaaatctcaaacagtacccaattccgacagccctgatcttctgacgttgcagaaatccattcattctgctagcactccaagcagcagaccaaaggagtggcgccccgagaagatctcagatctgcagacccaaagccagccattaaaatcactgcgcaagttgttacatctctcttcggcctcaaatcacccggcttcctcagatccccgcttccagcccttaacagctcaacaaaccaaaaattccttctcagaaattcggattcaccccctgagccaggcctctggcgggagcagcaacatccggcaggaacccgcaccgaagggcaggccagccctccagctgccagacggtggatgtgatggcagaagacagagacaccattctggaccccaagatagacgcttcatgttaaggacgacagaacaacaaggagaatacttctgctgtggtgacccaaagaagcctcacactccgtgcgtcccaaaccgagcccttcatcgtccaatctccagtcctgctccctatccagtactccaggtccgaggcacttccatgtgcccgacactccaggtccgaggcactgatgctttcagctgcccaacccagcaatccgggttctctttcttcgtgagacacgttatgagggaagccctgattcacagggcccaggtaaaccaagctgcgctcctgacataccatgagaatgcggcactgacgggcaagtgacttctgcaagcctgcggctggtcccaatgccctgaatcacctctctcatggaagaaccaattaacaccaatgaatcaaccaaaac

SEQ ID NO: 167 - DNA, 1968 bp, Homo sapiens
gaggaggaggaggagatgactggggagcgggagctcgagaatactgcccagttactctagcgcgccaggccgaaccgcagcttcttggcttaggtacttctactcacagcggccgattccgaggccaactccagcaatggcttttgcaaatctgcggaaagtgctcatcagtgacagcctggacccttgctgccggaagatcttgcaagatggagggctgcaggtggtggaaaagcagaaccttagcaaagaggagctgatagcggagctgcaggactgtgaaggccttattgttcgctctgccaccaaggtgaccgctgatgtcatcaacgcagctgagaaactccaggtggtgggcagggctggcacaggtgtggacaatgtggatctggaggccgcaacaaggaagggcatcttggttatgaacacccccaatgggaacagcctcagtgccgcagaactcacttgtggaatgatcatgtgcctggccaggcagattccccaggcgacggcttcgatgaaggacggcaaatgggagcggaagaagttcatgggaacagagctgaatggaaagaccctgggaattcttggcctgggcaggattgggagagaggtagctacccggatgcagtcctttgggatgaagactatagggtatgaccccatcatttccccagaggtctcggcctcctttggtgttcagcagctgcccctggaggagatctggcctctctgtgatttcatcactgtgcacactcctctcctgccctccacgacaggcttgctgaatgacaacacctttgcccagtgcaagaagggggtgcgtgtggtgaactgtgcccgtggagggatcgtggacgaaggcgccctgctccgggccctgcagtctggccagtgtgccggggctgcactggacgtgtttacggaagagccgccacgggaccgggccttggtggaccatgagaatgtcatcagctgtccccacctgggtgccagcaccaaggaggctcagagccgctgtggggaggaaattgctgttcagttcgtggacatggtgaaggggaaatctctcacgggggttgtgaatgcccaggcccttaccagtgccttctctccacacaccaagccttggattggtctggcagaagctctggggacactgatgcgagcctgggctgggtcccccaaagggaccatccaggtgataacacagggaacatccctgaagaatgctgggaactgcctaagccccgcagtcattgtcggcctcctgaaagaggcttccaagcaggcggatgtgaacttggtgaacgctaagctgctggtgaaagaggctggcctcaatgtcaccacctcccacagccctgctgcaccaggggagcaaggcttcggggaatgcctcctggccgtggccctggcaggcgccccttaccaggctgtgggcttggtccaaggcactacacctgtactgcaggggctcaatggagctgtcttcaggccagaagtgcctctccgcagggacctgcccctgctcctattccggactcagacctctgaccctgcaatgctgcctaccatgattggcctcctggcagaggcaggcgtgcggctgctgtcctaccagacttcactggtgtcagatggggagacctggcacgtcatgggcatctcctccttgctgcccagcctggaagcgtggaagcagcatgtgactgaagccttccagttccacttctaaccttggagctcactggtccctgcctctggggcttttctgaagaaacccacccactgtgatcaatagggagagaaaatccacattcttgggctgaacgcgggcctctgacactgcttacactgcactctgaccctgtagtacagcaataaccgtctaataaagagcctacccccaaaaaaaaaaaaaaaaaaaaaaaaaaaaaaaaaaaaaaaaaaaaaaaaaaaaaaaaa

SEQ ID NO: 168 - DNA, 2654 bp, Homo sapiens
ttcccggtggctggctgctctgattggctgaacaaatagtccgagggtggtgggcatccgccctcccgacaaggcagaccaggccccctgcaggtcccctatccgcaccccggcccctgagagctggcactgcgactcgagacagcggcccggcaggacagctccagaatgaaaatgcggttcttggggttggtggtctgtttggttctctggaccctgcattctgaggggtctggagggaaactgacagctgtggatcctgaaacaaacatgaatgtgagtgaaattatctcttactggggattccctagtgaggaatacctagttgagacagaagatggatatattctgtgccttaaccgaattcctcatgggaggaagaaccattctgacaaaggtcccaaaccagttgtcttcctgcaacatggcttgctggcagattctagtaactgggtcacaaaccttgccaacagcagcctgggcttcattcttgctgatgctggttttgacgtgtggatgggcaacagcagaggaaatacctggtctcggaaacataagacactctcagtttctcaggatgaattctgggctttcagttatgatgagatggcaaaatatgacctaccagcttccattaacttcattctgaataaaactggccaagaacaagtgtattatgtgggtcattctcaaggcaccactataggttttatagcattttcacagatccctgagctggctaaaaggattaaaatgttttttgccctgggtcctgtggcttccgtcgccttctgtactagccctatggccaaattaggacgattaccagatcatctcattaaggacttatttggagacaaagaatttcttccccagagtgcgtttttgaagtggctgggtacccacgtttgcactcatgtcatactgaaggagctctgtggaaatctctgttttcttctgtgtggatttaatgagagaaatttaaatatgtctagagtggatgtatatacaacacattctcctgctggaacttctgtgcaaaacatgttacactggagccaggctgttaaattccaaaagtttcaagcctttgactggggaagcagtgccaagaattattttcattacaaccagagttatcctcccacatacaatgtgaaggacatgcttgtgccgactgcagtctggagcgggggtcacgactggcttgcagatgtctacgacgtcaatatcttactgactcagatcaccaacttggtgttccatgagagcattccggaatgggagcatcttgacttcatttggggcctggatgccccttggaggctttataataaaattattaatctaatgaggaaatatcagtgaaagctggacttgagctgtgtaccaccaagtcaatgattatgtcatgtgaaaatgtgtttgcttcatttctgtaaaacacttgtttttctttcccaggtcttttgtttttttatatccaagaaaatgataactttgaagatgcccagttcactctagtttcaattagaaacatactagctattttttctttaattagggctggaataggaagccagtgtctcaaccatagtattgtctctttaagtcttttaaatatcactgatgtgtaaaaaggtcattatatccattctgtttttaaaatttaaaatatattgactttttgcccttcataggacaaagtaatatatgtgttggaattttaaaattgtgttgtcattggtaaatctgtcactgacttaagcgaggtataaaagtacgcagttttcatgtccttgccttaaagagctctctagtctaacggtcttgtagttagagatctaaatgacattttatcatgttttcctgcagcaggtgcatagtcaaatccagaaatatcacagctgtgccagtaataaggatgctaacaattaattttatcaaacctaactgtgacagctgtgatttgacacgttttaattgctcaggttaaatgaaatagttttccggcgtcttcaaaaacaaattgcactgataaaacaaaaacaaaagtatgttttaaatgctttgaagactgatacactcaaccatctatattcatgagctctcaatttcatggcaggccatagttctacttatctgagaagcaaatccctgtggagactataccactattttttctgagattaatgtactcttggagcccgctactgtcgttattgatcacatctgtgtgaagccaaagccccgtggttgcccatgagaagtgtccttgttcattttcacccaaatgaagtgtgaacgtgatgttttcggatgcaaactcagctcagggattcattttgtgtcttagttttatatgcatccttatttttaatacacctgcttcacgtccctatgttgggaagtccatatttgtctgcttttcttgcagcatcatttccttacaatactgtccggtggacaaaatgacaattgatatgtttttctgatataattactttagctgcactaacagtacaatgcttgttaatggttaatataggcagggcgaatactactttgtaacttttaaagtcttaaacttttcaataaaattgagtgagacttataggcccaaaaaaaaaaaaaaaaaaaaaaaaaaaaaaaaa

SEQ ID NO: 169 - DNA, 4025 bp, Homo sapiens
cccggctctgcccgcccttcgaaagtccagggtccctgcccgctaggcaagttgcactcatggcacctccaagtgaagagacgcccctgatccctcagcgttcatgcagcctcttgtccacggaggctggtgccctgcatgtgctgctgcccgctcggggccccgggcccccccagcgcctatctttctcctttggggaccacttggctgaggacctgtgcgtgcaggctgccaaggccagcggcatcctgcctgtgtaccactccctctttgctctggccacggaggacctgtcctgctggttccccccgagccacatcttctccgtggaggatgccagcacccaagtcctgctgtacaggattcgcttttacttccccaattggtttgggctggagaagtgccaccgcttcgggctacgcaaggatttggccagtgctatccttgacctgccagtcctggagcacctctttgcccagcaccgcagtgacctggtgagtgggcgcctccccgtgggcctcagtctcaaggagcagggtgagtgtctcagcctggccgtgttggacctggcccggatggcgcgagagcaggcccagcggccgggagagctgctgaagactgtcagctacaaggcctgcctacccccaagcctgcgcgacctgatccagggcctgagcttcgtgacgcggaggcgtattcggaggacggtgcgcagagccctgcgccgcgtggccgcctgccaggcagaccggcactcgctcatggccaagtacatcatggacctggagcggctggatccagccggggccgccgagaccttccacgtgggcctccctggggcccttggtggccacgacgggctggggctgctccgcgtggctggtgacggcggcatcgcctggacccagggagaacaggaggtcctccagcccttctgcgactttccagaaatcgtagacattagcatcaagcaggccccgcgcgttggcccggccggagagcaccgcctggtcactgttaccaggacagacaaccagattttagaggccgagttcccagggctgcccgaggctctgtcgttcgtggcgctcgtggacggctacttccggctgaccacggactcccagcacttcttctgcaaggaggtggcaccgccgaggctgctggaggaagtggccgagcagtgccacggccccatcactctggactttgccatcaacaagctcaagactgggggctcacgtcctggctcctatgttctccgccgcagcccccaggactttgacagcttcctcctcactgtctgtgtccagaacccccttggtcctgattataagggctgcctcatccggcgcagccccacaggaaccttccttctggttggcctcagccgaccccacagcagtcttcgagagctcctggcaacctgctgggatggggggctgcacgtagatggggtggcagtgaccctcacttcctgctgtatccccagacccaaagaaaagtccaacctgatcgtggtccagagaggtcacagcccacccacatcatccttggttcagccccaatcccaataccagctgagtcagatgacatttcacaagatccctgctgacagcctggagtggcatgagaacctgggccatgggtccttcaccaagatttaccggggctgtcgccatgaggtggtggatggggaggcccgaaagacagaggtgctgctgaaggtcatggatgccaagcacaagaactgcatggagtcattcctggaagcagcgagcttgatgagccaagtgtcgtaccggcatctcgtgctgctccacggcgtgtgcatggctggagacagcaccatggtgcaggaatttgtacacctgggggccatagacatgtatctgcgaaaacgtggccacctggtgccagccagctggaagctgcaggtggtcaaacagctggcctacgccctcaactatctggaggacaaaggcctgccccatggcaatgtctctgcccggaaggtgctcctggctcgggagggggctgatgggagcccgcccttcatcaagctgagtgaccctggggtcagccccgctgtgttaagcctggagatgctcaccgacaggatcccctgggtggcccccgagtgtctccgggaggcgcagacacttagcttggaagctgacaagtggggcttcggcgccacggtctgggaagtgtttagtggcgtcaccatgcccatcagtgccctggatcctgctaagaaactccaattttatgaggaccggcagcagctgccggcccccaagtggacagagctggccctgctgattcaacagtgcatggcctatgagccggtccagaggccctccttccgagccgtcattcgtgacctcaatagcctcatctcttcagactatgagctcctctcagaccccacacctggtgccctggcacctcgtgatgggctgtggaatggtgcccagctctatgcctgccaagaccccacgatcttcgaggagagacacctcaagtacatctcacagctgggcaagggcaactttggcagcgtggagctgtgccgctatgacccgctaggcgacaatacaggtgccctggtggccgtgaaacagctgcagcacagcgggccagaccagcagagggactttcagcgggagattcagatcctcaaagcactgcacagtgatttcattgtcaagtatcgtggtgtcagctatggcccgggccgccagagcctgcggctggtcatggagtacctgcccagcggctgcttgcgcgacttcctgcagcggcaccgcgcgcgcctcgatgccagccgcctccttctctattcctcgcagatctgcaagggcatggagtacctgggctcccgccgctgcgtgcaccgcgacctggccgcccgaaacatcctcgtggagagcgaggcacacgtcaagatcgctgacttcggcctagctaagctgctgccgcttgacaaagactactacgtggtccgcgagccaggccagagccccattttctggtatgcccccgaatccctctcggacaacatcttctctcgccagtcagacgtctggagcttcggggtcgtcctgtacgagctcttcacctactgcgacaaaagctgcagcccctcggccgagttcctgcggatgatgggatgtgagcgggatgtccccgccctctgccgcctcttggaactgctggaggagggccagaggctgccggcgcctcctgcctgccctgctgaggttcacgagctcatgaagctgtgctgggcccctagcccacaggaccggccatcattcagcgccctgggcccccagctggacatgctgtggagcggaagccgggggtgtgagactcatgccttcactgctcacccagagggcaaacaccactccctgtccttttcatagctcctgcccgcagacctctggattaggtctctgttgactggctgtgtgaccttaggcccggagctgcccctctctgggcctcagaggccttatgagggtcctctacttcaggaacacccccatgacattgcatttgggggggctcccgtggcctgtagaatagcctgtggcctttgcaatttgttaaggttcaagacagatgggcatatgtgtcagtggggctctctgagtcctggcccaaagaagcaaggaaccaaatttaagactctcgcatcttcccaaccccttaagccctggccccctgagtttccttttctgtctctctctttttattttttttatttttatttttatttttgagacagagcctcgctctgttacccagggtggagtgcagtggtgcgatctcggctcagtgcaacctctgcttcccaggttcaagcgattctcctgcctcagcctcccgagtagctgggattacaggtgtgcaccaccacacccggctaattttttttatttttaatagagatgaggtttcaccatgatggccaggctgatctcgaactcctaacctcaagtgatcctcccacc

SEQ ID NO: 170 - DNA, 8368 bp, Homo sapiens
gcgatccgggcgccaccccgcggtcatcggtcaccggtcgctctcaggaacagcagcgcaacctctgctccctgcctcgcctcccgcgcgcctaggtgcctgcgactttaattaaagggccgtcccctcgccgaggctgcagcaccgcccccccggcttctcgcgcctcaaaatgagtagctcccactctcgggcgggccagagcgcagcaggcgcggctccgggcggcggcgtcgacacgcgggacgccgagatgccggccaccgagaaggacctggcggaggacgcgccgtggaagaagatccagcagaacactttcacgcgctggtgcaacgagcacctgaagtgcgtgagcaagcgcatcgccaacctgcagacggacctgagcgacgggctgcggcttatcgcgctgttggaggtgctcagccagaagaagatgcaccgcaagcacaaccagcggcccactttccgccaaatgcagcttgagaacgtgtcggtggcgctcgagttcctggaccgcgagagcatcaaactggtgtccatcgacagcaaggccatcgtggacgggaacctgaagctgatcctgggcctcatctggaccctgatcctgcactactccatctccatgcccatgtgggacgaggaggaggatgaggaggccaagaagcagacccccaagcagaggctcctgggctggatccagaacaagctgccgcagctgcccatcaccaacttcagccgggactggcagagcggccgggccctgggcgccctggtggacagctgtgccccgggcctgtgtcctgactgggactcttgggacgccagcaagcccgttaccaatgcgcgagaggccatgcagcaggcggatgactggctgggcatcccccaggtgatcacccccgaggagattgtggaccccaacgtggacgagcactctgtcatgacctacctgtcccagttccccaaggccaagctgaagccaggggctcccttgcgccccaaactgaacccgaagaaagcccgtgcctacgggccaggcatcgagcccacaggcaacatggtgaagaagcgggcagagttcactgtggagaccagaagtgctggccagggagaggtgctggtgtacgtggaggacccggccggacaccaggaggaggcaaaagtgaccgccaataacgacaagaaccgcaccttctccgtctggtacgtccccgaggtgacggggactcataaggttactgtgctctttgctggccagcacatcgccaagagccccttcgaggtgtacgtggataagtcacagggtgacgccagcaaagtgacagcccaaggtcccggcctggagcccagtggcaacatcgccaacaagaccacctactttgagatctttacggcaggagctggcacgggcgaggtcgaggttgtgatccaggaccccatgggacagaagggcacggtagagcctcagctggaggcccggggcgacagcacataccgctgcagctaccagcccaccatggagggcgtccacaccgtgcacgtcacgtttgccggcgtgcccatccctcgcagcccctacactgtcactgttggccaagcctgtaacccgagtgcctgccgggcggttggccggggcctccagcccaagggtgtgcgggtgaaggagacagctgacttcaaggtgtacacaaagggcgctggcagtggggagctgaaggtcaccgtgaagggccccaagggagaggagcgcgtgaagcagaaggacctgggggatggcgtgtatggcttcgagtattaccccatggtccctggaacctatatcgtcaccatcacgtggggtggtcagaacatcgggcgcagtcccttcgaagtgaaggtgggcaccgagtgtggcaatcagaaggtacgggcctggggccctgggctggagggcggcgtcgttggcaagtcagcagactttgtggtggaggctatcggggacgacgtgggcacgctgggcttctcggtggaagggccatcgcaggctaagatcgaatgtgacgacaagggcgacggctcctgtgatgtgcgctactggccgcaggaggctggcgagtatgccgttcacgtgctgtgcaacagcgaagacatccgcctcagccccttcatggctgacatccgtgacgcgccccaggacttccacccagacagggtgaaggcacgtgggcctggattggagaagacaggtgtggccgtcaacaagccagcagagttcacagtggatgccaagcacggtggcaaggccccacttcgggtccaagtccaggacaatgaaggctgccctgtggaggcgttggtcaaggacaacggcaatggcacttacagctgctcctacgtgcccaggaagccggtgaagcacacagccatggtgtcctggggaggcgtcagcatccccaacagccccttcagggtgaatgtgggagctggcagccaccccaacaaggtcaaagtatacggccccggagtagccaagacagggctcaaggcccacgagcccacctacttcactgtggactgcgccgaggctggccagggggacgtcagcatcggcatcaagtgtgcccctggagtggtaggccccgccgaagctgacatcgacttcgacatcatccgcaatgacaatgacaccttcacggtcaagtacacgccccggggggctggcagctacaccattatggtcctctttgctgaccaggccacgcccaccagccccatccgagtcaaggtggagccctctcatgacgccagtaaggtgaaggccgagggccctggcctcagtcgcactggtgtcgagcttggcaagcccacccacttcacagtaaatgccaaagctgctggcaaaggcaagctggacgtccagttctcaggactcaccaagggggatgcagtgcgagatgtggacatcatcgaccaccatgacaacacctacacagtcaagtacacgcctgtccagcagggtccagtaggcgtcaatgtcacttatggaggggatcccatccctaagagccctttctcagtggcagtatctccaagcctggacctcagcaagatcaaggtgtctggcctgggagagaaggtggacgttggcaaagaccaggagttcacagtcaaatcaaagggtgctggtggtcaaggcaaagtggcatccaagattgtgggcccctcgggtgcagcggtgccctgcaaggtggagccaggcctgggggctgacaacagtgtggtgcgcttcctgccccgtgaggaagggccctatgaggtggaggtgacctatgacggcgtgcccgtgcctggcagcccctttcctctggaagctgtggcccccaccaagcctagcaaggtgaaggcgtttgggccggggctgcagggaggcagtgcgggctcccccgcccgcttcaccatcgacaccaagggcgccggcacaggtggcctgggcctgacggtggagggcccctgtgaggcgcagctcgagtgcttggacaatggggatggcacatgttccgtgtcctacgtgcccaccgagcccggggactacaacatcaacatcctcttcgctgacacccacatccctggctccccattcaaggcccacgtggttccctgctttgacgcatccaaagtcaagtgctcaggccccgggctggagcgggccaccgctggggaggtgggccaattccaagtggactgctcgagcgcgggcagcgcggagctgaccattgagatctgctcggaggcggggcttccggccgaggtgtacatccaggaccacggtgatggcacgcacaccattacctacattcccctctgccccggggcctacaccgtcaccatcaagtacggcggccagcccgtgcccaacttccccagcaagctgcaggtggaacctgcggtggacacttccggtgtccagtgctatgggcctggtattgagggccagggtgtcttccgtgaggccaccactgagttcagtgtggacgcccgggctctgacacagaccggagggccgcacgtcaaggcccgtgtggccaacccctcaggcaacctgacggagacctacgttcaggaccgtggcgatggcatgtacaaagtggagtacacgccttacgaggagggactgcactccgtggacgtgacctatgacggcagtcccgtgcccagcagccccttccaggtgcccgtgaccgagggctgcgacccctcccgggtgcgtgtccacgggccaggcatccaaagtggcaccaccaacaagcccaacaagttcactgtggagaccaggggagctggcacgggcggcctgggcctggctgtagagggcccctccgaggccaagatgtcctgcatggataacaaggacggcagctgctcggtcgagtacatcccttatgaggctggcacctacagcctcaacgtcacctatggtggccatcaagtgccaggcagtcctttcaaggtccctgtgcatgatgtgacagatgcgtccaaggtcaagtgctctgggcccggcctgagcccaggcatggttcgtgccaacctccctcagtccttccaggtggacacaagcaaggctggtgtggccccattgcaggtcaaagtgcaagggcccaaaggcctggtggagccagtggacgtggtagacaacgctgatggcacccagaccgtcaattatgtgcccagccgagaagggccctacagcatctcagtactgtatggagatgaagaggtaccccggagccccttcaaggtcaaggtgctgcctactcatgatgccagcaaggtgaaggccagtggccccgggctcaacaccactggcgtgcctgccagcctgcccgtggagttcaccatcgatgcaaaggacgccggggagggcctgctggctgtccagatcacggatcccgaaggcaagccgaagaagacacacatccaagacaaccatgacggcacgtatacagtggcctacgtgccagacgtgacaggtcgctacaccatcctcatcaagtacggtggtgacgagatccccttctccccgtaccgcgtgcgtgccgtgcccaccggggacgccagcaagtgcactgtcacagtgtcaatcggaggtcacgggctaggtgctggcatcggccccaccattcagattggggaggagacggtgatcactgtggacactaaggcggcaggcaaaggcaaagtgacgtgcaccgtgtgcacgcctgatggctcagaggtggatgtggacgtggtggagaatgaggacggcactttcgacatcttctacacggccccccagccgggcaaatacgtcatctgtgtgcgctttggtggcgagcacgtgcccaacagccccttccaagtgacggctctggctggggaccagccctcggtgcagccccctctacggtctcagcagctggccccacagtacacctacgcccagggcggccagcagacttgggccccggagaggcccctggtgggtgtcaatgggctggatgtgaccagcctgaggccctttgaccttgtcatccccttcaccatcaagaagggcgagatcacaggggaggttcggatgccctcaggcaaggtggcgcagcccaccatcactgacaacaaagacggcaccgtgaccgtgcggtatgcacccagcgaggctggcctgcacgagatggacatccgctatgacaacatgcacatcccaggaagccccttgcagttctatgtggattacgtcaactgtggccatgtcactgcctatgggcctggcctcacccatggagtagtgaacaagcctgccaccttcaccgtcaacaccaaggatgcaggagaggggggcctgtctctggccattgagggcccgtccaaagcagaaatcagctgcactgacaaccaggatgggacatgcagcgtgtcctacctgcctgtgctgccgggggactacagcattctagtcaagtacaatgaacagcacgtcccaggcagccccttcactgctcgggtcacaggtgacgactccatgcgtatgtcccacctaaaggtcggctctgctgccgacatccccatcaacatctcagagacggatctcagcctgctgacggccactgtggtcccgccctcgggccgggaggagccctgtttgctgaagcggctgcgtaatggccacgtggggatttcattcgtgcccaaggagacgggggagcacctggtgcatgtgaagaaaaatggccagcacgtggccagcagccccatcccggtggtgatcagccagtcggaaattggggatgccagtcgtgttcgggtctctggtcagggccttcacgaaggccacacctttgagcctgcagagtttatcattgatacccgcgatgcaggctatggtgggctcagcctgtccattgagggccccagcaaggtggacatcaacacagaggacctggaggacgggacgtgcagggtcacctactgccccacagagccaggcaactacatcatcaacatcaagtttgccgaccagcacgtgcctggcagccccttctctgtgaaggtgacaggcgagggccgggtgaaagagagcatcacccgcaggcgtcgggctccttcagtggccaacgttggtagtcattgtgacctcagcctgaaaatccctgaaattagcatccaggatatgacagcccaggtgaccagcccatcgggcaagacccatgaggccgagatcgtggaaggggagaaccacacctactgcatccgctttgttcccgctgagatgggcacacacacagtcagcgtcaagtacaagggccagcacgtgcctgggagccccttccagttcaccgtggggcccctaggggaagggggagcccacaaggtccgagctgggggccctggcctggagagagctgaagctggagtgccagccgaattcagtatctggacccgggaagctggtgctggaggcctggccattgctgtcgagggccccagcaaggctgagatctcttttgaggaccgcaaggacggctcctgtggtgtggcttatgtggtccaggagccaggtgactacgaagtctcagtcaagttcaacgaggaacacattcccgacagccccttcgtggtgcctgtggcttctccgtctggcgacgcccgccgcctcactgtttctagccttcaggagtcagggctaaaggtcaaccagccagcctcttttgcagtcagcctgaacggggccaagggggcgatcgatgccaaggtgcacagcccctcaggagccctggaggagtgctatgtcacagaaattgaccaagataagtatgctgtgcgcttcatccctcgggagaatggcgtttacctgattgacgtcaagttcaacggtacccacatccctggaagccccttcaagatccgagttggggagcctgggcatggaggggacccaggcttggtgtctgcttacggagcaggtctggaaggcggtgtcacagggaacccagctgagttcgtcgtgaacacgagcaatgcgggagctggtgccctgtcggtgaccattgacggcccctccaaggtgaagatggattgccaggagtgccctgagggctaccgcgtcacctatacccccatggcacctggcagctacctcatctccatcaagtacggcggcccctaccacattgggggcagccccttcaaggccaaagtcacaggcccccgtctcgtcagcaaccacagcctccacgagacatcatcagtgtttgtagactctctgaccaaggccacctgtgccccccagcatggggccccgggtcctgggcctgctgacgccagcaaggtggtggccaagggcctggggctgagcaaggcctacgtaggccagaagagcagcttcacagtagactgcagcaaagcaggcaacaacatgctgctggtgggggttcatggcccaaggaccccctgcgaggagatcctggtgaagcacgtgggcagccggctctacagcgtgtcctacctgctcaaggacaagggggagtacacactggtggtcaaatgggggcacgagcacatcccaggcagcccctaccgcgttgtggtgccctgagtctggggcccgtgccagccggcagcccccaagcctgccccgctacccaagcagccccgccctcttcccctcaaccccggcccaggccgccctggccgcccgcctgtcactgcagctgcccctgccctgtgccgtgctgcgctcacctgcctccccagccagccgctgacctctcggctttcacttgggcagagggagccatttggtggcgctgcttgtcttctttggttctgggaggggtgagggatgggg

SEQ ID NO: 171 - DNA, 1715 bp, Homo sapiens
gaattccagcggcggcgccgttgccgctgccgggaaacacaaggaaagggaaccagcgcagcgtggcgatgggcgggggtagagccccgccggagaggctgggcggctgccggtgacagactgtgccctgtccacggtgcctcctgcatgtcctgctgccctgagctgtcccgagctaggtgacagcgtaccacgctgccaccatgaatgaggtgtctgtcatcaaagaaggctggctccacaagcgtggtgaatacatcaagacctggaggccacggtacttcctgctgaagagcgacggctccttcattgggtacaaggagaggcccgaggcccctgatcagactctaccccccttaaacaacttctccgtagcagaatgccagctgatgaagaccgagaggccgcgacccaacacctttgtcatacgctgcctgcagtggaccacagtcatcgagaggaccttccacgtggattctccagacgagagggaggagtggatgcgggccatccagatggtcgccaacagcctcaagcagcgggccccaggcgaggaccccatggactacaagtgtggctcccccagtgactcctccacgactgaggagatggaagtggcggtcagcaaggcacgggctaaagtgaccatgaatgacttcgactatctcaaactccttggcaagggaacctttggcaaagtcatcctggtgcgggagaaggccactggccgctactacgccatgaagatcctgcgaaaggaagtcatcattgccaaggatgaagtcgctcacacagtcaccgagagccgggtcctccagaacaccaggcacccgttcctcactgcgctgaagtatgccttccagacccacgaccgcctgtgctttgtgatggagtatgccaacgggggtgagctgttcttccacctgtcccgggagcgtgtcttcacagaggagcgggcccggttttatggtgcagagattgtctcggctcttgagtacttgcactcgcgggacgtggtataccgcgacatcaagctggaaaacctcatgctggacaaagatggccacatcaagatcactgactttggcctctgcaaagagggcatcagtgacggggccaccatgaaaaccttctgtgggaccccggagtacctggcgcctgaggtgctggaggacaatgactatggccgggccgtggactggtgggggctgggtgtggtcatgtacgagatgatgtgcggccgcctgcccttctacaaccaggaccacgagcgcctcttcgagctcatcctcatggaagagatccgcttcccgcgcacgctcagccccgaggccaagtccctgcttgctgggctgcttaagaaggaccccaagcagaggcttggtggggggcccagcgatgccaaggaggtcatggagcacaggttcttcctcagcatcaactggcaggacgtggtccagaagaagctcctgccacccttcaaacctcaggtcacgtccgaggtcgacacaaggtacttcgatgatgaatttaccgcccagtccatcacaatcacaccccctgaccgctatgacagcctgggcttactggagctggaccagcggacccacttcccccagttctcctactcggccagcatccgcgagtgagcagtctgcccacgcagaggacgcacgctcgctgccatcaccgctgggtggttttttacccctgcc

SEQ ID NO: 172 - DNA, 3318 bp, Homo sapiens
gtgatgcgtagttccggctgccggttgacatgaagaagcagcagcggctagggcggcggtagctgcaggggtcggggattgcagcgggcctcggggctaagagcgcgacgcggcctagagcggcagacggcgcagtgggccgagaaggaggcgcagcagccgccctggcccgtcatggagatggaaaaggagttcgagcagatcgacaagtccgggagctgggcggccatttaccaggatatccgacatgaagccagtgacttcccatgtagagtggccaagcttcctaagaacaaaaaccgaaataggtacagagacgtcagtccctttgaccatagtcggattaaactacatcaagaagataatgactatatcaacgctagtttgataaaaatggaagaagcccaaaggagttacattcttacccagggccctttgcctaacacatgcggtcacttttgggagatggtgtgggagcagaaaagcaggggtgtcgtcatgctcaacagagtgatggagaaaggttcgttaaaatgcgcacaatactggccacaaaaagaagaaaaagagatgatctttgaagacacaaatttgaaattaacattgatctctgaagatatcaagtcatattatacagtgcgacagctagaattggaaaaccttacaacccaagaaactcgagagatcttacatttccactataccacatggcctgactttggagtccctgaatcaccagcctcattcttgaactttcttttcaaagtccgagagtcagggtcactcagcccggagcacgggcccgttgtggtgcactgcagtgcaggcatcggcaggtctggaaccttctgtctggctgatacctgcctcttgctgatggacaagaggaaagacccttcttccgttgatatcaagaaagtgctgttagaaatgaggaagtttcggatggggctgatccagacagccgaccagctgcgcttctcctacctggctgtgatcgaaggtgccaaattcatcatgggggactcttccgtgcaggatcagtggaaggagctttcccacgaggacctggagcccccacccgagcatatccccccacctccccggccacccaaacgaatcctggagccacacaatgggaaatgcagggagttcttcccaaatcaccagtgggtgaaggaagagacccaggaggataaagactgccccatcaaggaagaaaaaggaagccccttaaatgccgcaccctacggcatcgaaagcatgagtcaagacactgaagttagaagtcgggtcgtggggggaagtcttcgaggtgcccaggctgcctccccagccaaaggggagccgtcactgcccgagaaggacgaggaccatgcactgagttactggaagcccttcctggtcaacatgtgcgtggctacggtcctcacggccggcgcttacctctgctacaggttcctgttcaacagcaacacatagcctgaccctcctccactccacctccacccactgtccgcctctgcccgcagagcccacgcccgactagcaggcatgccgcggtaggtaagggccgccggaccgcgtagagagccgggccccggacggacgttggttctgcactaaaacccatcttccccggatgtgtgtctcacccctcatccttttactttttgccccttccactttgagtaccaaatccacaagccattttttgaggagagtgaaagagagtaccatgctggcggcgcagagggaaggggcctacacccgtcttggggctcgccccacccagggctccctcctggagcatcccaggcgggcggcacgccaacagccccccccttgaatctgcagggagcaactctccactccatatttatttaaacaattttttccccaaaggcatccatagtgcactagcattttcttgaaccaataatgtattaaaattttttgatgtcagccttgcatcaagggctttatcaaaaagtacaataataaatcctcaggtagtactgggaatggaaggctttgccatgggcctgctgcgtcagaccagtactgggaaggaggacggttgtaagcagttgttatttagtgatattgtgggtaacgtgagaagatagaacaatgctataatatataatgaacacgtgggtatttaataagaaacatgatgtgagattactttgtcccgcttattctcctccctgttatctgctagatctagttctcaatcactgctcccccgtgtgtattagaatgcatgtaaggtcttcttgtgtcctgatgaaaaatatgtgcttgaaatgagaaactttgatctctgcttactaatgtgccccatgtccaagtccaacctgcctgtgcatgacctgatcattacatggctgtggttcctaagcctgttgctgaagtcattgtcgctcagcaatagggtgcagttttccaggaataggcatttgcctaattcctggcatgacactctagtgacttcctggtgaggcccagcctgtcctggtacagcagggtcttgctgtaactcagacattccaagggtatgggaagccatattcacacctcacgctctggacatgatttagggaagcagggacaccccccgccccccacctttgggatcagcctccgccattccaagtcaacactcttcttgagcagaccgtgatttggaagagaggcacctgctggaaaccacacttcttgaaacagcctgggtgacggtcctttaggcagcctgccgccgtctctgtcccggttcaccttgccgagagaggcgcgtctgccccaccctcaaaccctgtggggcctgatggtgctcacgactcttcctgcaaagggaactgaagacctccacattaagtggctttttaacatgaaaaacacggcagctgtagctcccgagctactctcttgccagcattttcacattttgcctttctcgtggtagaagccagtacagagaaattctgtggtgggaacattcgaggtgtcaccctgcagagctatggtgaggtgtggataaggcttaggtgccaggctgtaagcattctgagctgggcttgttgtttttaagtcctgtatatgtatgtagtagtttgggtgtgtatatatagtagcatttcaaaatggacgtactggtttaacctcctatccttggagagcagctggctctccaccttgttacacattatgttagagaggtagcgagctgctctgctatatgccttaagccaatatttactcatcaggtcattattttttacaatggccatggaataaaccatttttacaaaa

SEQ ID NO: 173 - DNA, 2824 bp, Homo sapiens
gttttgaaagttgatggagcgaactgcttttccaaagactcttttgaaaaactttttaagtaggccattctgactttaacatttctctttgtcttaacattagacaaaaagtaaccttcctgaagaggacatgtgattggaagttgtcaattgttgaagcattggtaactccagtctctaacgttttagaaaatcataacaagcggttctctaccctgtaaaggtgaactactgagttcttcattatgtctgatggagattatgattacctcatcaagtttttagctttgggagactctggtgtagggaagaccagtgtactttaccaatatacagatggtaaatttaactccaaatttatcacaacagtgggcattgatttcagggaaaaaagagtggtgtacagagccagtgggccggatggagccactggcagaggccagagaatccacctgcagttatgggacacagcagggcaggagaggtttcgtagcttaacgacagcgttcttcagagatgctatgggttttcttctactttttgatctgacaaatgagcaaagtttcctcaatgtcagaaactggataagccagctacagatgcatgcatattgtgaaaacccagatatagtgctgtgtggaaacaagagtgatctggaggaccagagagtagtgaaagaggaggaagccatagcactcgcagagaaatatggaatcccctactttgaaactagtgctgccaatgggacaaacataagccaagcaattgagatgcttctggacctgataatgaagcgaatggaacggtgtgtggacaagtcctggattcctgaaggagtggtgcgatcaaatggtcatgcctctacggatcagttaagtgaagaaaaggagaaaggggcatgtggctgttgagaagtcaagtaagcgacatagtagttcaggtggcccatgcctgggatcttctctatgattgatacatggcacagtgagagattaatgggcattgtgtacaaattgcttctcaccatccccattagacctacgaataaagcatccggttctaaaattaatttgttgcagctttgtaaatatttctttaagattcagcctgagagttaggagaaatatttcagagccaaaagtgccttatacaaccttagcctattatagtaaatcattcaaggattcagaattttgcagtcacagaagagtgtatttattatgtagaatgaatgagggtactgtcacctgccttaatgtaggtaggcccagagtcttacatttaagatcttacatgcagttataaaaccgccacagtcttcaatccagatttgaagactcatgccataggtgacattctaaaataccattaaagccacttaaatgttaaataagaatatacatgcacatcagctcaatgtctttgagtattaattttatgtaagcattctatttaacatgaatataggacaaatcatggctatatctatagaccttggataaactggattgaccaattatacactcacggtgacttttttattggtgggaaggggattggggtggggcaggctggcttaatgtaatatgagcaaccaaagtgggacttctgtctccccgctatattcccattgctctgaatggttgattgaagggtcagggaactagattttatggctttagttcactgtgattgtacatttatacttggcctatgtgctggccgcacctgaacatagctggtgcttatgccgagttatttgcgatgagtaaatatttagtttctttttcttcatatttataatgttgatctggcatcctcaggctgcagctttattagcttataacttactcatctctatctttaccagcaggctctgtattgttgatatttgcaacttgttttgcttttccattggtggaattgaaataattagtttttaattacataagatgcctgtttgctatttggtggaagatagatgttcatattgaagcagtcacatttgtactgtagttcaataaaagaaaaatgaagtattctgtagcctatatttttcatagagctcatgagcatttactgtacttgctgggtcttgccaagatcatttattccgctgcattgccaaagtgtcttcataccaaattaaaggtggttttaatatatgtttcatggaagttgtttataaaattcaaaggtatttcatttaggtgaaaagtcttatttattaaagtggtttgaataaagtagatcaaaacttccagagatcttaatggctatataggaagaaatatcactcaccataatttaaataaagaataaaaatacttgtattttgtggtggcaaatgtttggtagaactgtaattagaaaaatacaagtatatttgcgtgatggttacactagaagcccagactttacgactacacaatatattcatgtatctaaactgtacttgtaccccctaaatttatttttaaaaaaggaaaaataaaagtatcatgaaaaaacctatttttttttccactgtccttccactactcccataacaaacttatccatggttggtaaaattttacatatttctatccttgaaatgaaggcttcttttaaattccaaagaagtcatggaggcctgtgcatttgaattgtatatgctagtgaggaaaagatttagacatttcaagagcagggttggccaggcgcggtggctcacacctgtaatcccagcactttgggaggccgaggagggcggatcacgaggtcaggagatcgagaccatcctggctaacacagtgaaaccccatctctactaaaaaaaaaa

SEQ ID NO: 174 - DNA, 3316 bp, Homo sapiens
cactctctttctctctccctctggcatgcatgctgctggtaggagacccccaagtcaacattgcttcagaaatcctttagcactcatttctcaggagaacttatggcttcagaatcacagctcggtttttaagatggacataacctgtacgaccttctgatgggctttcaactttgaactggatgtggacacttttctctcagatgacagaattactccaacttcccctttgcagttgcttcctttccttgaaggtagctgtatcttattttctttaaaaagctttttcttccaaagccacttgccatgccgaccgtcattagcgcatctgtggctccaaggacagcggctgagccccggtccccagggccagttcctcacccggcccagagcaaggccactgaggctgggggtggaaacccaagtggcatctattcagccatcatcagccgcaattttcctattatcggagtgaaagagaagacattcgagcaacttcacaagaaatgtctagaaaagaaagttctttatgtggaccctgagttcccaccggatgagacctctctcttttatagccagaagttccccatccagttcgtctggaagagacctccggaaatttgcgagaatccccgatttatcattgatggagccaacagaactgacatctgtcaaggagagctaggggactgctggtttctcgcagccattgcctgcctgaccctgaaccagcaccttcttttccgagtcataccccatgatcaaagtttcatcgaaaactacgcagggatcttccacttccagttctggcgctatggagagtgggtggacgtggttatagatgactgcctgccaacgtacaacaatcaactggttttcaccaagtccaaccaccgcaatgagttctggagtgctctgctggagaaggcttatgctaagctccatggttcctacgaagctctgaaaggtgggaacaccacagaggccatggaggacttcacaggaggggtggcagagttttttgagatcagggatgctcctagtgacatgtacaagatcatgaagaaagccatcgagagaggctccctcatgggctgctccattgatgatggcacgaacatgacctatggaacctctccttctggtctgaacatgggggagttgattgcacggatggtaaggaatatggataactcactgctccaggactcagacctcgaccccagaggctcagatgaaagaccgacccggacaatcattccggttcagtatgagacaagaatggcctgcgggctggtcagaggtcacgcctactctgtcacggggctggatgaggtcccgttcaaaggtgagaaagtgaagctggtgcggctgcggaatccgtggggccaggtggagtggaacggttcttggagtgatagatggaaggactggagctttgtggacaaagatgagaaggcccgtctgcagcaccaggtcactgaggatggagagttctggatgtcctatgaggatttcatctaccatttcacaaagttggagatctgcaacctcacggccgatgctctgcagtctgacaagcttcagacctggacagtgtctgtgaacgagggccgctgggtacggggttgctctgccggaggctgccgcaacttcccagatactttctggaccaaccctcagtaccgtctgaagctcctggaggaggacgatgaccctgatgactcggaggtgatttgcagcttcctggtggccctgatgcagaagaaccggcggaaggaccggaagctaggggccagtctcttcaccattggcttcgccatctacgaggttcccaaagagatgcacgggaacaagcagcacctgcagaaggacttcttcctgtacaacgcctccaaggccaggagcaaaacctacatcaacatgcgggaggtgtcccagcgcttccgcctgcctcccagcgagtacgtcatcgtgccctccacctacgagccccaccaggagggggaattcatcctccgggtcttctctgaaaagaggaacctctctgaggaagttgaaaataccatctccgtggatcggccagtgaaaaagaaaaaaaccaagcccatcatcttcgtttcggacagagcaaacagcaacaaggagctgggtgtggaccaggagtcagaggagggcaaaggcaaaacaagccctgataagcaaaagcagtccccacagccacagcctggcagctctgatcaggaaagtgaggaacagcaacaattccggaacattttcaagcagatagcaggagatgacatggagatctgtgcagatgagctcaagaaggtccttaacacagtcgtgaacaaacacaaggacctgaagacacacgggttcacactggagtcctgccgtagcatgattgcgctcatggatacagatggctctggaaagctcaacctgcaggagttccaccacctctggaacaagattaaggcctggcagaaaattttcaaacactatgacacagaccagtccggcaccatcaacagctacgagatgcgaaatgcagtcaacgacgcaggattccacctcaacaaccagctctatgacatcattaccatgcggtacgcagacaaacacatgaacatcgactttgacagtttcatctgctgcttcgttaggctggagggcatgttcagagcttttcatgcatttgacaaggatggagatggtatcatcaagctcaacgttctggagtggctgcagctcaccatgtatgcctgaaccaggctggcctcatccaaagccatgcaggatcactcaggatttcagtttcaccctctatttccaaagccatttacctcaaaggacccagcagctacacccctacaggcttccaggcacctcatcagtcatgctcctcctccattttaccccctacccatccttgatcggtcatgcctagcctgaccctttagtaaagcaatgaggtaggaagaacaaacccttgtccctttgccatgtggaggaaagtgcctgcctctggtccgagccgcctcggttctgaagcgagtgctcctgcttaccttgctctaggctgtctgcagaagcacctgccggtggcactcagcacctccttgtgctagagccctccatcaccttcacgctgtcccaccatgggccaggaaccaaaccagcactgggttctactgctgtggggtaaactaactcagtggaatagggctggttactttgggctgtccaactcataagtttggctgcattttgaaaaaagctgatctaaataaaggcatgtgtatggctggtc

SEQ ID NO: 175 - DNA, 779 bp, Drosophila melanogaster
attaatcgaatgactagtttacacgtcaatttactgaagttactgaagacaagctttttcctatacgaaataaaatagtttcttattaaacatgggactaacaatatctagtcttttgacacgtttgtttggaaaaaaacaaatgcgtattcttatggttggcttggatgctgctggaaaaacgactattctgtacaaattaaagctgggtgaaattgtaaccaccataccaaccataggcttcaatgtcgagactgtggaatataagaatatatgttttaccgtttgggatgttggtggccaagacaaaattcgcccgttgtggcgacactatttccaaaatacacagggtcttatatttgtagtggattccaacgaccgcgatcgtataactgaagctgaaagagaactacagaacatgctccaggaggatgaacttagggacgcggtacttttggtttttgccaacaaacaggacctaccgaatgcaatgacagctgccgagcttacggacaagttgcgccttaaccaattaaggaatcgccactggtttattcagtctacatgtgctacccaagggcacggtctttatgaaggacttgattggctatcagctgaattggctaaaaaataaaaatattccttatattgtaagataggaattgctgttctcgtatgctgaaaactagattttaaataaacttgtaaatgtatataaactcgtttggaactttgttgtaaatttaaaatgtccacgttttatgtgttggtgagaaaac

SEQ ID NO: 176 - DNA, 1510 bp, Drosophila melanogaster
agcgcgggaaagaagtcagctgtcaccatttgtgcgaagacaagcggaataattgcgataaataaaagcagaatagcgacagacaattgcacaaacctgattcatgttgtaaccaaaacaaactactagcattacagtacatatatcaagtatttgctgagcgttttgcaggtgaatttcgcaaagcaattccctagtcggacaaaagcagaacctctaaaaaaagcgcgcagtcgaaggagtctttaaaatatcggtctacgctctgcaatctccgaggtacagtcatggccaaggtgcacatcaccaacgtggtggtgctggacaacccgagcagcttcttcaacccctttcagttcgaactcacgttcgagtgcattgaggagctaaaagaggatctagagtggaagatgatctatgtaggctcggcggagtccgaggagcacgaccaggtgctggacaccatatacgtgggacctgtgcctgaggggcgacacatctttgtcttccaggcggatccgccagacgtcagcaagatcccggaaccggatgcggtgggcgttaccattgttctgcttacctgctcctaccgcggccaggagttcgtccgcgtgggctactatgtgaataacgactacgctgacccggagatgcgcgagaacccgccaacaaagcctcttttcgagaagctgacgcgaaacatcctggccagcaagccgcgcgtcacccgattcaaaatcaattgggactacgggcacatcaacgggaatggaaatggcgtggagaacggccatcaagatgagatggccaccgatggaccgtccacatcggaggcggcttcagcagttatccatcccgaagatgataatagtttggccatgccaatggagaacggaatcaaggccttgaacgagaactccaactcactggccatggaatgttgagagctgccggcagtccgaacaatgaccacactaacacactgtctctcacttaaaccaacatgggcaacaatggataacttagcactcctggtcctcgtccctctttttacttctaagtaactaagattaaagcaaaaatatatgtatacattaaattatttcacaaaacatgcattttcttagctatatttgacttttctgtgcgcacttatttgtgtttgaagaatgactaatacgttcatggcaaagttcagttggccgtgttcaatagaaatgatacccttttttttattaagaaactctattatcaattattgcacttgtacagcattaatgcctaaatagaaataataagcatattcttgaaagaaactccgttttcaataattgaattttgtacagaactgattttttgtctaaatgatttatatgatttttttgttgtttaaaaacaagttaagtaaaaaatgggaaaaattcacatcagattggaagagaaatttaatattatcaggacggcattttattatatttaattatatctaaaaatattcataaacctgaaa

SEQ ID NO: 177 - DNA, 4821 bp, Drosophila melanogaster
catttgtcgaaaaacccgcgacgcattcggacttcaagcaagagtccgctttgccgagatataaaattaataacgagatcgagtaccagctgcacacagtggaaatgagaaaagaccgacggcaaaacaatagaacacacccgattagtcgtgcgtaaccgattgactaaagcacggggcagagtcgatagaaaaaatatacagttttaaagcgcttaattaggtgttttctaacgttggtacatctcaacggagtggataacgagaagagtgaagggaggagaaccattggcaagaacatactcaccaaaatggataatttcgataaaatatttaacagtgaaagtgaaaacggttgaagttttaaaataaaaagaaataactcgtacgccaaagaatgcaatattaagtgcagccttgggttaatgcctatcaggcattttacattgactgccattcgagcgtattaattgaaaatcttatgagggagcaaggctctcgagtaagtttataaactgtgtccgaagtagcattaaatatcaaaaagtgaaaatacaagacaaatatttgaaaagtgtgcctgcataaaactgaattaaaagtaagggccgattgctctttaaaaaatagggttagtctatggcgtgcattcactagagaaatatggaaaagcggcttagcgacagtcccggagattgtcgcgtaacgagatccaccatgacgcccactctgcgcctggatcagacttccaggcaagagcctctgccccagcagccggataatggcccagctgcagcgcctggaaagtctaagtcccccactccgttgcccggaaaatcacaggccgcccagcatcaccagttccgcgctccgcagcagcagcagggcccgaaaaaccggaacaaggcctggagtaagaggcaacacaaggccggcgggaagcacaaccccagtgcctgtgtcggcgcaagcagtggccaggcccagtctacgggctcctcggtcatagccgcgactctccttcccactgcggcgtcggctcacaaggcggatctcgagaacatccagaatatccataacaaaaatctgactgccggcggtggagtcaaccatcatgggaacgccggaacagcgcatcacggcggtggcggtggtgccggcgcccatcatgccgcagcgggtggccaccatcaccatcacaacactaggctggcgcaaaacgctgccgctggtggagccagcggaggaggaaccattcaaatgcataagaaaatgttgagaggtcaccatcaccacgtgctgtgcgccggaaacaatgctaaccacacgtgctgcctggtgacgggatgcaacggcagctctatcggcggagtaggcgtggcaggaagcggaggagctaccgcctcagcggggggcggcggagcgtcgtgcaaggaagcgcagagctgcaaggacaccagctcgctgagcggcaacagcagcattgcgggcagcgctggagcgggcaacgcagtccactattgctgcggccgctccaagttctttttgccggagaagaggttacgcaaggaggtgattgtaccgcccaccaagtttctgctgggcggcaacatctccgatccactcaaccttaattcgctgcagaacgagaacacctcgaatgcctcctccaccaacaacacgccggcgaccacgccccgccagtcgcccatcactacgcctccgaaagtggaggtgatcataccgcctaacatccacgatccgctccacctgctggaccccgttgattccatggagtacgagaagcagctgacgtcgccgatgaagcgcgctgggccaggaggtgggatgctccaccaccggcagcaccactatcgcacgcgaaagaaccgaaagcgacggcgctttgactccaacaacacctcgcatgccggcgatgaaggaggggtcggaagcgagctgaccgacgaaccgccgctgcccgcagccacctcttcgctggcggcgtcgccggtggcagcgccccttaacgtaggcggcagcttgctgctgagcgaatccgctgccccagccccgggcgaaacggcggaaatgggacaacagcaggagcaggcgcatgtgcactctccgcagtcggcatcaacgacgacgaccgccgctgagatgcccaccccgacgccaaccagtgcagcggcagcgactgcgaccgcggagcacaaggagcagtcggctccagcgccgactgcaacgtcgtcgccacagcggcagcagcaacatgtggccgctgcagccgaggaactccccactccggaaacttccgctgctgctgagacgccggcagaggagatgctccttagctgttcggccacgtcggcctcactggtggcttcgacgctggcagagcgaagggccagccgagacctgcgtctggacttgtcgagcacgtgctacggcgttggcggcacgggtctgagcttcggcggcagcatctcatccagcgtcggcagtagctttggtggcggtgggaggaagaggaaaatcagcgagagcagcacttcgcaaaagagcaagaaatttcatcgtcacgatgccatggacaagattgtcagtccagtggttccgcagccaggagcctggaagagaccgccacgcatccttcagcccagcggagctaggaagcccagcacccgccgctctacgtccgtcagcgaatcggaactactcagtcccgtggaagagcagccgcccaaacagctgcccctcatcggggtggagataccccgtgatgacacgccggatttgccggatcatgggctaggcagtccgctgagcactacttcgggggccacctcgcacacggccggcgagcaggattctctggccggtgtggacatcagcatgggggatacattggggtctggggtcgtgggcaaggcaccgctgactagtagtcttatgctggaaccggctaaaattccaccaattaaaatgctgccaaagtttcgggccgatggattaaagtaccggtacggaaacttcgaccgctacgtggactttcggcagatgaacgagtttcgagacgtgcgcttgcaggttttccagcgtcacgtggaactgttcgagaacaaggacattctagacattggctgcaatgttggccacatgaccattacggtggccagacatctggcaccaaaaacaattgtcggtattgacattgaccgggagcttgttgcacgagcaaggagaaatctgtcgatctttgtgcgtattcccaaggaggaaaagctgctggaggtcaaagcagagccaacggttgatgcaaaagcgaatatcgcggtgaaggatgagacatctggagcagctcacaagaaaacgagacggggcaagaggagacgcaaggtgcatcaaggaatacatcatcatcaccatcatcatcatgatttagaacagctgcaacagcaacagaagttgaactcgttgcttgttaagccacacgaattctttcccatttctttccctctgacctacggacgtattccccgtattttatcatcgagtaaatcgcccaacatgctcgggaacaagaatcagtttccggcaaacgtcttcttcagacacaccaactatgttctcaaggacgagtcattgatggccagcgatacccagcaatacgatctcatactgtgtctctcagttactaagtggatccatctcaactttggagacaacggcttgaagatggcatttaagcgcatgttcaaccagctgcgacccggtggaaaacttatacttgaagcccaaaactgggccagctacaagaagaaaaagaacctaacgccggaaatatataacaactacaagcagatcgagttctttccgaacaagtttcacgaatacttgcttagttcggaggtaggattcagtcacagctatacgcttggcgtgcctcgtcacatgaacaagggcttctgccgacccatacagttgtatgcaaagggcgattataccccgaatcacgttcgttggagcgatgcatattatccccagacgccatatgaagcatatcggggcatttacgccaccctgcccgttcaccggatgggcggcggtgggagcagcgcgggcggtagcaatagtgggcatgctcaaatgctgcaccttagcagctccagtcggtcgcagaactatgatacgccgcactacgcaggtagcgcatcgggatcggccagctgcagacagactccaatgtaccagcccacctacaacccgttggaaacggactcataccagccaagctacgacatggaatatctcaaccacatgtacgtgttcgcctcgccgctttaccagaccgtctggtcacctccagcctcgctgcgcaaaagcagctcgcatactccggtatttggaagcgtgcgcgatgcagagctggacggtgatggcagtggtggtgggggcagtggtggcggaagctaccaccgccacgtctatccgccaaacgacgacacttgttcgcccaacgcaaacgcttgtaatgcgtttaactcgattcgggacgcggacacagacgattctaaccagctgcctgggggaagtcgacgacatgtgtatgcaaccaactgcggagagagctcctcatcgccgcaggtaaatcaccacgatgcggttggcgaatttgtggacggtcttatggacgacgaacagaagtcttcaacaggcggaggaactggtggcgcagcttattgtgatctgtcggatgcctagaatagggatcttttaggcaggaaaaatgtgtcaaaaagaaaaagaacaaaaaaa

SEQ ID NO: 178 - DNA, 1549 bp, Drosophila melanogaster
ctaattcgcactacttgcaaaaaaattactagttacttaggtttttgaccttgaaaaaggtaaagttactggttaatgaccacaacaactcaagtggattatatagatctgtggaagggcagtcaattgaccgtctggccgcacttttttgcacttatcactgcgcagtcacaattgcaaattgcacaaagaacgtcaatatttataaatcgaattaacgctgcacccgtcaagtgaatcttccgccgacgaatggatcatcgtgttttcctgtcgctgatctttgtgctcagcggcaccttcaacgttctggtggtgaagtgggccaatcaacaacaggtaatcggcagcgatggaaaacttcatggatttcaacatccagtggtgttcacactgctcatgttcctgggcgagttcctgtgctttgcggtcttcaaggtgatccgcctgatctccaatcgtcgtggagttatatccgatctggatagcatcttgtcgcaggacagcagtgagttccgccctgttagcatgctattgcccactttgctggatgcggcagcctccattctgttgttcaccggactttacttgacttacgccaccagctttcagatgataagaggcgccgccctgatctttgtgggcatctttagcaccatgtttctgaatcacacgctgaccggacggcactggctggccatctttacgatatcgtgcggcctgctggacattatcagtctggacgtccatcgcgttgaatacgacctggtcacgttgccttacacggactacaaatccattctgaccggcgacttactcatcatcattgctgaaattctgcacggactgcaatatgtttgcgaggagaaacagctaaaaacctcgaatgttgctccactgcaagctgctggctggcagggaatcttcggcttgggcatcacctcgatgctggccatttgcatgaacttcctgccgagcattgatccatttagctgtagttcgcgtgcagttttcgacgattggggtgatctctttgcggctctgcaggggagtatctcattgattatgactctgattgccttcaccatctcatgtgccatgtacaacttcattggactgtacattgcgatgtactcgtccagcgccaaccggcttctggccgatggcctacgcgtttacttcatctgggtgtttgtgattatcatggagtgggagtacatgaatctggtcacgatcatgggcttcctcatcctgcaaatgggtatcatcctctaccgacaggccctattcctcgactggtatcgagctgcagtggcccgctggtatcgtgctcgttacgtggatttgggtactgagaatgcggctgctccgaacagccggccagcggatgtgatctaaggtgactgaggagtagctgaggtgaaaggattgtgatgagagagatgggctgcaaatcaaccctgggctgattcttgaagattacttatcgattatatgtatagatgcaataagaaaatacacacattaaatgttaattgagctcctagaa

SEQ ID NO: 179 - DNA, 2018 bp, Drosophila melanogaster
atgctgcagtcaaaggtgatcatgacgctgtcgcgtaaggactttcaagcccttttaatcgtaatatgctttggtttttggatcgagaaccttgttcagggcgcagatgattactatgtatatagtccggtgtgccagatgcccgccgtgaatcccttcacgtgggacacaatgagtaatttccacagaaagacgctaaggcattgccacaacgacagcgacatggtaacgagtgaattcgacttcgagacacatcagtaccgactgcatgtgcacgagcacctggccaagcccattatgaacaggaagggcaatgccaccctggagtgcgagtaccaggagatttcacgggataactccgaccagaagcccgacaatgcctataatcagctaagaaggcggcccatagagcagcaccagttcgttccgaacaacaccgactacatgatcaccagttgctacgtgagggatgtgaccaagcaccgggagctgctgcaacaggatgccatttccttcatcgaggaccgcctcccaaaggagaaggtcaaggatttcgtgaaggacgaaagtgaggtgcacaagccgagcgttctgatcatgggactggactccacatcgcgcataaatcttcgacgagccatgccatcggtttacaaattcgttagacaacccggctggttcgaaatgcagggctacaataaggtgggcgacaatacctttcccaatcttctggccgcgctgacaggggattccgaaaagggagtaggggattattgtgatgtcacaaagccgggctgcttggactccctgaacttcatttggaagcgtttcaagaaagccaactacacaacagccttcgccgaagattgttcatctattagtaccttcaattacctgaaaccgggatttgtgaagcagccaacggattactaccttcgcccactacttttcgccatcgaaaaacaatttaaagtgaccaatgacttcggatttgcctactgcgtgggtcgccacctcagcttcagctacgtctgggactttggccagcagttcatcgatcgcttcctcggcagatccccaatgttcggctttctatggagcaatagcttcacccacgattactacgagggagccactgcactggacaacctgctctggaagtatctaaagtccttcgaggagtccaatctctttcagaagtccattgtgattctgatgagtgatcatggccaccggtataacactttgaggcgggcttccactgggtatttcgaggagcgcatgccgatgatgttcatctacttgccaccctggttccggcgcaagtatccccatttggcgagtaatctcggcaagaaccagaatcgactctcgtccaactacgatgtgtacatgacgctccagcacttgctccagttggatagcaagtccgtggatgagttcccggataatctaagggcaaggcagtgtaagagctgtcagtcgcttttcttcgagctgcccttcaatcgcacttgccaaatggccggaatcgaggagaaatggtgctgttgccagcccacggaaaccattacgaattccccgcatgtgagcacaattgccgaggctattgtccagcgaatgaacgaacacttaattagccataatctcagcgatctttgccacaatttcacattggattatgtggagaaagcagatcgcaaaaccatcctgtccaacggacttcggccggctgataaaaacgagcaagtttacatcattgttttcgaaactgtcccgaaaaacccaatttttgaggccactgtgcgctggaatagtcgaacccaaaggcttcttcacttcgatgtcgaggagctaagtcgattgacctcctacaagaatgatgccaactgtataaatcgcaagaatgccaagaagtattgcatttgcaaggacagcttaagtaggcctagttagcactggttaaattgtataattcataataaggaaagaaagataccattgtgtacccactatat

SEQ ID NO: 180 - DNA, 2340 bp, Drosophila melanogaster
aagtcagttggtcagagcagaaagatctaattaaaagtgaaaagatcaggagaatctactgggcaacatggtgcacacgtctacttcgaataactcccagaagtggccacaatatgtggccgcattggccgctgctggtggcgccttcgccgccggtaccgtcctgggttggacatcgccggccgaaacggagatcgtggatcgcggcgaaggatacgatttccctgtcgacaaggatcagttttcgtgggtaggatctgccatgaccctgggtgccgcctgtgtgtgcattcccattggcttcctgatcaacatgattggccgaaagtggaccatgctgtttctggtgctgcccttcattctcggttggaccatgctcatctgggcggtcaatgtcagtatgctgtatgcctcgcgcttcatcctcggtatcgccggtggagctttctgtgtgaccgctcccatgtacacgggtgagattgctcagaaggagattcgcggaacgctgggcagcttcttccagttgatgataaccattggtatcctgttcgtctatgccgtcggagctggtgtgaaaatattctggttgagcatcatttgcggcattctgcccctcatctttggcgccatcttctttttcatgccggaatcgcccacctacttggtttccaaagatcggtcggagaacgccatcaagtccattcaatggctgcgtggcaaggaatacgattacgagccagagctggcggagctgcgtgaaaccgaccgggaaaccaaggccaacaaggtcaacgtgtgggctgctctgaaccgacccgtcacccggaaggctttggccatcagcatgggtcttatgttcttccagcaggtctgcggaatcaatgctgttattttctacgcttcgaggatctttttggaagccaacactggcatcgaggctgagtgggcaacgatcctgatcggtatcatgcaagtggtggccaccttcgtctccaccctggtagtagacaagctgggccgtcgcatcctgctgttggcctcaggaatttccatggccatttccaccaccgccatcggagtgtacttcttcctccagaaacaggacgcggcacaagtggtgagtctgggctggctcccagtggccagtctgtgcctgttcatcatcatgttctcgatcggctatggaccggtgccatggctgatgatgggagagctcttcgccaccgacatcaagggatttgctggatcgctggccggaacatccaactggcttttggcattcgtggtgaccaagacgtttgtgaacttgaacgatggcctgggaattggcggaaccttctggctattcgctggtctgactgttgtgggtgtgatattcgtttatttcgccgtgccggaaaccaagggcaagagtctcaacgagattcagcaggagctggctggcaaccggtcgactccacaagctattcccgcggaaaagtaaaggggcaatgtccacctgaggagcccgaaaggcaaatcgcgattcgcaatccggaaggcgaaagacggaccggaaatcactgttaacttgctgttaatatacgttcgatttaagttcgcgtttagtgcaagtcttttggcgttttcgatggatgaatttgtttatagaatttaatatgcgcatagattttcgtttaagcatagcaagattcagatgaagatgaagaaaattgcaggaaactataactaagagcgaagactgaaggtcaactgcagaaaagccgcgataatatttttttgcagccatagaaaagacaacagcaatttaagaaaaaacatatatacctatatatatatccatataatgtatgtatgcttatttagtgttattcattcaaccaacgaaatctgttttacaaaattttaagccatacttgcatttgttcggatttttaaggtgtttgcaagcatttcttcgataattcttaatctaattgtactatattgtatgtctatatgtatatgaactttatgtatgtgtagctgtttgggtctaaatttcaagaagcattcagtcgattcacttaccatagctcggttaagttgtaagcctcgccatttgccaatatatttatttacgccaagttagcgagaggaagatgtttatattttatttaataaaaccaaaatatacgcattattttttaataattttccaaccgatatttgaatttaattttatgatcgctgaaagctacacagaaatcccgtctatcattgttaaacttgcataaagtatttatgaaaaaatttaaacaactgatgaaaataaaaatatatcaatatatttaatatgtt

SEQ ID NO: 181 - DNA, 1232 bp, Drosophila melanogaster
aaagtttttaatcaagtttaaattgaggccctatcatggaggagctgtgcaacaattccggacactcggctacttccagcagtggcagcaactcgtcgatatcggccaaaaccgcgctaagtgaatgctctgctgcttggataaattacttgagcgccttgaacaacctatgtactgccggctccaaattggcgcactctattgcagttttggaacagtggtcgttgagcgaaaagccgttgttcaataattatacaacgacttatttaaccaattcatggaacgacttggcaagagcaacaaccgtggccacaggaacagtcaagacccacatgctggccttgctgcaggatttcgtcaccatatcatccatggaccagacctccagtaccgacttggatcaaaagcggctcagggagcacaacgaactgattgtgttagagaatgcacaggctgtaatcaacattcagcaccagttctgtgcagccagctatgatgccttttcgtccctaacttgctgctttgtttgccaatcgccagttggatttccacatgaacaggactgcagtgttatgaagcagcgccgaccagcccagaggtccctcgcctcaactgaacttttgcgatgccaatcctatgcaggccattttcgagcatacacgaggtcccttgccaaaccccggccaattactgtccatgaagattccatttcaccggaacgtcaagtcgtccttaagttttccattatttcccctgaacggtcagcgtcgatggtcggaagcagctgctgccgaggtgatcgatggcatctccacggatcccgaaagccaaatgaggaggtggtcaatgccatgggaagcatctaagactgataggaacactgtcacatggaaccaaaccaggataatgccaatgaacactttgaaaacctcttgctacaagatgtctagctcggaacgatatacttcccactccggtattccctcaaatcattataatttcattttaaaatctaaaacctatttgctgcagatggaaactggcccctggcttcaaccagtcaagatgggctgttagaagctattcaactactatccatcaaacccaccaccgtcccacaaatgagtactcagccctcaattttgtcgacttctccggatggagcatcacttgactaaatttcatctaaactgaaacgaaaataaaaataaatatcaagcatattatacatt

SEQ ID NO: 182 - DNA, 2163 bp, Drosophila melanogaster
aaaaacagctgcatttaacgcgattcgactcgggatttgtgtccttccttttatgagatgatatgccgactctgcctggaggatgctgagcacggggtgcccattttcggccaggaaccgccaatgggacaaccggcacatcgccagctggccgagctgatcgagcgacatctgctgctggtgttggcggaaaacgacgtggtgtccacgtgcctgtgcaaccgctgctggcggcagctggccgagatcgagcaattctgttccatggtagcggagaagcagcggtcgctgcaccgctccttgcagctgaaaactgaattgccggagctgcccgaactgacggagccggagcccgccctggtcgtgtggaacacggagtcgccaatcgagccaaagctcagctatgagggcgatgacatcaaggatcacatactgtgcgaacccgtcatcgacgccttgtccgcgggcgatgaaaaagacagtgactatggcgacacctttgaaccggacttcgagccggaatcgcagccagatgaagaagaagaaccggagccggatccggtaaaaccgcgccccaggggcaggccgcgcaaaactgcgctgcagcaaacgcatcaaatcatcaaaaggaagtacgagaagcgcaaacagcagaacaaggccaagatcacagagttatcattacgggaatcaagagcccggcaaagggaacttaaacgcagcagtgctggagcagaggatgatcaggatggcgacgaagacgaggaggacgaagaagatgtcgggggcgagctaacaccagatgccgacgaacagccaaagccgcgcggcaaacgtggccgacccaagaccaagaaactggtaaccgccgacgataatgatgatacctcggaggtgcccgtcaagcgcagcagcatcaaggaaatggacgactatatagccgccaatgttaagctcgactgcgccatttgcgccgccccgctggaagacttcaacgatctcaagcgccactttcgcgtggagcacgactgcactggctatgtgaagtgctgcaacaatcggtacaagaagcggacactgtacgtcgaccatttgcactgccacaaggatccgcagtactttagctgccagagctgccgcaagaacttccttaaccgcaacagccaggtgatgcacatgctgcgcttccactcgcagcagcaagagctggtccaccagtgtgccatctgcgaggcgcgctttgccaagaaattcctgctgaccatgcatcttaaaggacacaagggcaccgagcgtcccgaggtgtgcgacacctgcagcaagacattccgcaccaagtttgagctaagtgcccatgtaaagcgcatgcatgcggcagactttacgcccatcatatgcgacatatgcggtacacacttcaggagcaaggccaactttctcatccacaagaaggcgttgcatccggacgggccggtggcggaggtgcagtgtaccctgtgcggccgctggctgcgggacgaacggagcctgcgcaagcatctggcacgccacgatgaccgcgacggcgacaccaagtaccgatgcctgctctgcaatgcagagaagtcatcccgtgccgcactcagcagccacatgcggtaccatcactccgccaagcggcacaagtgcagtctctgcgacaaggagttcaagctgccgcgggcattggccgagcacatggccactcacacgggcatcgatctgtaccaatgccagttttgtacgcgcaccttcaagtctcatgccaacatgcacaaccacaagaagaagatgcatcccaacgactgggtgagaaagtactcgcagcccagcagtagcattacctccacagcggctccacttgctcatcccaatcatcctaaccagcctgctcctccagcggcagctccgactaatctagccgggcacatgctgccgccactcggtggcattgccaagtcgctgattgagatacccgataccgagggcttcgatttcggcagcaacagctccgtgtgccccacgcccgactgaatctgtgtgttgtgtgtctgtgtttggtgtctgtccctgcgactttgtgtacacgttccctggtcgggatttatgtataaaatcgtacaaataaactttattaatatacaa

SEQ ID NO: 183 - DNA, 2074 bp, Drosophila melanogaster
aaattggctatcgcctggtgccaagctggtcacaccggcaccttgagcttgccttgttaaaaacatagcaagccttaaaaattaaataaaaaaaaggaattcaacaattatattattgcaaagaactgcgaacattcataattcagaaccttttaaaatttcaaaggggataaaaataaagtataaaaaaataatacaactaaattcatcgataggcaatcgctactatcgttacgacgataccatcgtaccagctctaaagcaaaacaagaagaaaaaccattctttttctgcaaaggaaatagttgcaatttgttgatttactagcttaaatcgagtgtaaaatgagttcggctcgcttcgcgcgctcagggcgcgtccgtatctgcatcctgatgagcatgttcatcgtgctcatcatgatgattgttatctaccaaatgtcccaacaccaattggacgagagccgcgccttccaagagggcctcagtgtccagatgcaatccctgaatgccgaaaaacttaccgccgagaagagaatgagcgcgctgcgctcggaaaagatgaccctgcaggagcagtacgagggtcagttggcggaggcactgcagaagcagcacgacacggaacacgcactgcaggagaagttcgacgctcaggtggaaaagtacaagctgctggagattaagtacaccaacctggaggccgagttcgtcaagagcaagaagaaacacatcgaggacacgaacgctttcgaccaaaagctgcaaaaggtcctggcggatcttcataaggacaaggccagcaaggagcgcgaggtggctgcctggaaggaaaagctggacaagctacagcgcgatggtgagcacaagattcacgccctggaagccacaattgcggaattcaagaccaactgcaactatgtacctaaagtccagcccgccgaggcaccggtccagggacaccagcagcaactgaataagcccgccgagcagatgcccaccacgcaccactcaaatcctgcccagctagcgcacagcattgaaaagccccgcaacgagaagtccttcgatgcccaagtgcaagtgagtgaaggcctctacaggattggcggcggggtaaatctgctagcaactaacccaaaacaaaacctaacaaacgcgtctactaacttcacacttaagagtaacggtgacggaacccaagagcagccgcaactgcctctgcagccttttgccgtgtccaacaaccacagcctcatactaaactctgttgaaaactttcagattgtgcccaaatcggtcagtgagaagcaacagcaggaggagccgcaactatccggcggtcctgtttccccgttaagtgcaccccgcaagagcagcacccaagcctcagtgggcagcgcttcggacaagaaagccggtgatgcccccaacgcatctgtagccccaaaagttagtagcagcggccttcccccgcttgcagtgccaccagcgaagactgagcgcaaacttcccgaaaacgtggctcccattcccgagaactttgaagacaaagcggatactaagggcgacgctgtcgatgtagacaacgccgccgaagacctgccgaagaacgagaacaacaatcgttacgccaacgcagtaaatgatatggagggcaacaaaaatgtaggcgtagctcccaaacccatcgaggattcgggcgctcacgaagttaaggatgcgttaaacgagcctagctttaatttgcccgccgctggtggcggccagaatttcttcgatggcgaattgccggcacctggtcccggacccgttcccgatgaaacggccaaacagatggccgaggcagccggtgccggaggaggtggcgacggagatgacgacgacgatgtgggtgatgtggccgtgaaacagccacagcatttgctcgatacagacaatctaaacaacgaaatcgttgctgaccagggtaaggagttcgccgaaggcatccacctggaagacggcatggatgaagatcaagatggtgagtggaagtgctcacaaatcggaataaatgcttaacactttaa

SEQ ID NO: 184 - DNA, 954 bp, Drosophila melanogaster
cgcagcgacagcagcggggaaactagaaggccaacaaaaatctcggcaagcataatgcacaaaatcaaaatgatttcgcggacgtatgtccggctgaaaagaagcaacgattcggtggtccaaatgcccagaatcaaaatgaattttgcaaacaacaagggtgggttcgctggaaaccgctatcgcaaaaacaatcgcgctggaaaccaaaaccggacttttccaggcaacaacaattcaaatgcacttcctaagaacaatgaaccggcaactgcagcttctggccaaaatcaagcgaatcagaacgccaacatgggccaaaatcaacggcaaggacaaaaccaaaatcaatcaatcaagtccatggtcaaagaaatcaaggtggaccagaatatcaaggaggtgcaggcaattaaggaggccaaggaaatcaaggaggagccggaaattagggaaatgatccaggattcagaggtcgcaatgctggtaacaatcaaggtggcggtttctccggaggtccgcagaaccagcagcgtgacaaccgaaaccgtagtggtccacgccttgcgaaggtgcaggtggcacgatgaacagcaccaatatgggtggtggtggcgatggagacggtggtccgcgcggctgtgaagacttcttcatttcccagcggttttgcagcatttctgggcccacctttgtgtacgattcgcaccgaatgtcattttgcaggtgagaaatctcacaccgttcgtttccaacgagctgctgtacaagtccttcgaaatctttggtcccatcgagagggccagcatcaccgtcgacgattctggcaagcatatgggcgagggcatagttgagtttgctaagaagtcatcggccagcgcctgcctgcggatgtgcaatgagaagtgcttcttcctgactgcttcccttcgaccgtgtctggtcgatccgatg

SEQ ID NO: 185 - DNA, 225 bp, Drosophila melanogaster
atgtcgactactccagaggatcggctgcgtgagaacatcaatcgatgcctctcggattccctggtgaagggagttggtggtctggtgatcggatccgtggtcaccctgctcttcttccgtaggcgcatatggcccgtctggctgggcactggattcggcgtgggcgtggcatatcgtggctgtgaaaaggagctcaacgatgtaaagtttggccaacgaaagtga

SEQ ID NO: 186 - DNA, 1340 bp, Drosophila melanogaster
aaattagactgtaaaatcaaaagaatggatgctcaaggagaccaggatatgcggctggatccgccgctctttgtgacctgtgacatggagcagtttcgcgatccaaacaagaagcgtgccgccaacgatgcctgcgaggagctggacaagctggatgcccaggacgagatcagtgtgtcgagtatcatttcggcgctattgagaccgattgagccctcggacgatcagtacaaggtgtgcgactggggcatcaatcccaagcagtttatgcccaccaaacaggcgatcattttcaaggaacagttgttcatatcgaagttgcggaatacaaattgcaagctaaatgaaaatctaaaaatcttctttgagcgggaacttgagcagattggacgcttctgtttgaatgtggaggaatcctttgatggctatgtgatcttcagcagcagcaaaatgaagaagggcaagggtatgacggaatgtggtcaccagttaaaggggaagtacgatgacaagttccttctcatctgcgagaagagatcggagttcgaccgaatcgacaatactcgggtagagaagacgctggagttgcgaaaccatgccgatttgatgctaaccgccattcgcgaaaccaaaatcaatgaggaagtgcagcgcttcaaggctcgcatcgatatcaaggatcgcgatcatgtgttcgtcctggatggcgggattatgctgctgatgcgacacctagtgtgcaacaattttgtgggcaacttcgagtactacacaatgaatttgtatggccgggtccttcgctgcaatctggttgtttccaaggagcgcaaggaggtgcgaattttctatcgcacatacaagaatgtcgtgcacatcttcacccagcaatgtttcaacgatgagctccaggatgtggccgagaccttcatgactcctgagggccggattgttctgcattattggcgtggctataactaccttttgcatgccgcctgcatgccaccgaagagaaaggaacctatcctacccaaattggaactaatgtggcgccaaaacgaacagctttctcgcaagttccgggagctcaaagccctcaattacgagaacgccaccagctatctgagcagcaattcacagctggccgattttatgcaggattatgtgctcaatctgttgcggtacaagcccagcaatgtcctagagttctccattatgtttttccagaatatgtcaaagggatagcttaattcttaattaggtaatgagtgttttcaaaatttcaagtgatctttggccagataatcctataaatacattcgggatgggcctatttagtatat

SEQ ID NO: 187 - DNA, 420 bp, Drosophila melanogaster
atggctgccatgcagaagaaggtcatcattgtggattcgaagagttactttgataagctcatcgatgatgcgggaaccaacaaatacgtacttgtcgagttcttcgccacctggtgtggtccttgcgcgatgattggtccccgcttggagcaactggcatcggattacttcggacggatgttggtccttaagattgacgttgatgagaacgaagatctggccgttcagtacgaagtcaacagcatgcccacatttctgatcatcaaaaaccgagtgacactaatccagttcgtgggcggcaatgtcgaaagggtcgtcagcacggtggagaagtttgtgggcaaggtggaggactccaaggagcacaagtcgaaagagggaggtgctagttcagctaccgtgccgaaattggaacgctaa

SEQ ID NO: 188 - DNA, 715 bp, Drosophila melanogaster
aaagcgtaaacaacatgtgcgaatcggttactccggcggatcagcgcaatgtggaggtgaaggcacggattccgggtggatctgagggctttgagcagcgcctaatcttggccagaaacctgagcggcagccaggatgcgcagttaatcgagcagagggacgtcttctttgaatctccgctgggtggacggcttaaattgcgctacttacagacgccatcgcgctcccaattggtctactacgatcgtcccgatgtggccggtcccaagctttccaagttcaacaagacggaggtggacgaaccggaggtgctggagaagatcctgagccagtcgaacggcgtacttggtgtcctggccaagcgacggcacttgttcctttgcggacagacgcgcatccacctggacgaggtaaaggatctgggatacttcatggaactggaggtgtgcctgacagaggatcaaaccctcgaggagggtcaagccattgccgagaaactgtccagggaactgggtatccaggaggcggacctcatgatcggctcgtatttcgatgctctcagaaagctcaatcattaatcattcattttgtacatcctcgttaggattagttctgtacccaaaaaatgggactctgtcttgtatcatagaattaccaacatttgttatccataaaacattctgtgaggcaaacaaaaaatgtatgtatgtaaatg

SEQ ID NO: 189 - DNA, 1573 bp, Drosophila melanogaster
cccgattgttaaacaatttgtacatacaatttcgtaaaaacaaagcaacagaactacacatttccaatatacattttcaaaatattttggtaaaacgaaaaggtcaactttgtattcactttggcttacgcgcgctgcatgatattttacatttttccaaaattttccaaaagcaactttcttgcgaaaaaactaatcgaacaaggcaaaccatacgtgctcctgtacaactttctttggcttgtagacacatagagaattcgcttgcgatggctacttcgagggcccacaatgtgaccgtcacgcataattcgttggttcagtggtcccgtggcgatattctcgattggttcaacgagacgctccaatgcaacctaatcaatatcgaacagttgtgcaccggtgcagcctattgtaatttgatgcatatgctttatcccaaactgatcaatttgaagcgagttaagtttttttcgaatcaagaatacgagtacgttaacaatttcaaggaacttcaaaaagccttcaataaggtaaatgtaagcctaccagctgaggtcaatgatttgatcaagggccacagggtagaaaattttaaatttgccgtgtggttccgacactttttcaatgtcaatcacactaaggataaatgcgctggctacgatgcactggtagctcgtgaccatcagaacatcggtatcggatcctcaaaattgacaaccaaagatcgttttcgcttggtgaaggtgaagacgacagctatacgaggtaaagttgcgacttgccaggcgacgattaacagtagcctttgcacgggcaaagctaaccaggacgaggatagccagcacacggataaaaaggacgaggatagccgtgaccagggtagccagtacgaggatagccccggcatggatagccagtacaaggattgccgtgaccaggatagccagtacgaggatagccacggcaaggatagccagtacaaggattgccgtgaccagggtagccagtacgaggatagccacggcatggatagccagtacgaggatagccgtgaccaggatagccagtacgaggatagccccggcatggatagccagtacaaggatagccgtgaccaggatagccagtacgaggatagccacggcaaggatagccagtacaaggattgccgtgaccagggtagccagtacgaggatagccacggcatggatagccagtacaaggatagccgtgaccagggttgccagtacgaggatagccacggcaaggatagcgaagacgaggatagccagtacgaggatagccaggacattcacatggtgctccaaagagaccactgatatcgtgacgtcgtcggtttttaattcctggccaagctcattgtcaactcaaaactctcaaaagaactagtcaaagcacacggtagcctcgaaggagtaaggatgtgaagacgaaggctgcctgcttttcaaaattaacagttttgaactctttaaaccaaattcacattttctccactgcttttgtatttcatggtttggaaattgaaaattaaaatgttgacccaaaa

SEQ ID NO: 190 - DNA, 469 bp, Drosophila melanogaster
caaaatgctacaaaaattaaataagaacattctgtcactgacgttagtgcagatcgcaacggaaaactgaagctctgcaattggagtacgaaagtgcaactagaggatcgattggatatataatttatttcgcaacttagagagattgccgccatatgttaatgaactgaacaaaatggtttggatttcgagctgggggcaactttggctggtgttgctattggttgtgggcctatcgttgggtcttccgagcttggaaaaccagacacacgaacaaatcgaacagataatagcctgcagacagccaaaggcacctggtttgtgccggggtcaccagttgcgatatgcctacaacaagaagaccggaaactgcgagagcttcatctacacgggctgtgcctccactgagaacaatttcctgaccttcgaggagtgtcgcagggattgcatgcaacgtctgcgctactga

SEQ ID NO: 191 - DNA, 374 bp, Drosophila melanogaster
gtagtaccgacatttaaatagacttacttcctgaacatttcaaaatcgcaaaagtggtgccaaaatgggtattactctgttccgattggccagttttactccaaaactgaaggagctgcgaatcattctggatcccaaaggagacacttccaagggagtcagggaatacgtggaaaggttctatccaaacctgaagaagagcaatcccgacctgccgatcctcgtgcgcgagtgctctggcgtccagccccgcctctacgcccgctatggcaacggcaaggaagtgtccctctccctggccaaccacgctgctcctgacatacacaaaaacctggaagcggttggcaaatagaacttacgctggaaaactatgt

SEQ ID NO: 192 - DNA, 1788 bp, Drosophila melanogaster
atgccagttgaaatggagtccttggatcagaagccctttcgcttggcggtgggtcgagctgcctggtggatacccaatcccggaagggtagcacgatacccacccatccgcactctggcacccaaccacttacctggaacttccgcggaggatacgcgaaaattgtcatttgccgcagctttaaaggatttgctgcagaacctgtcgttccattgttacagcaaattagtggagtcgggtcggcggatccaggagcgtttcttttggttcgttttccacataaccgctttgacagtcttaattgcattcctctggggcacctacaccaaggagcaggaggccttggtgaccaccatgtaccatccgatgtatcccatttggaaggtggagttcccggccatatctgtgtgcagcttgaaccgcatctcccaacgtgcggcctggcaatatgcccacaatctaagtggcaaagatcccaagcagcgcaatgccagccatttctacgaccaactgaaggcctttatgtacatgtactacgatccatcagatctgatggacatagacaatgcccttcgctttcagagcttcctggacagatttgatacggctaaagaggagctattctttaataccaggaatcgcatgagtgccctcaccccgaactgtagtgatatgtttgtgagctgccgaatcgccggtcgtctgttcgactgcatggataagtttgagacgaccctgaccagtcatggcttctgctgcaccttcaactacgatggaagatatgtaaataaaagggactttaggcagcgctactttggacccgacatgggattggtcttgactctgaaaacggaccccagtgacaacttttacaagattaatggccacaatggctatccggaccccttctccggcggagtggccgagcgcgtggccgagaccggctttaacaccttgttgcctgtgagggcaaagattttcgagactctgcccgaggcgcgcagtatgagcccgtcggtgcgcaagtgtctgtttgagaacgagatgccgtggatcttcgcccgtcattataccttcagtaagtgcatctcggcctgcagggcgcagagtgtggtcagcctgtgcgagtgcgttccatttagcctgccccacagatacatcgatgggagcgagaagaggatctactgcaccctgcagcacctggcttgtctcaagcgttacgagttcaagtggttgaacgtcatcaccagtcgcgagaacgtgacgggtctggagcacgagctgcaggacgccctctactgcccgctctgtctggcctcctgcacggagacgcgctatagtgtccggggagccatgacactgggcctgcccactcccagccagatcaagggtcctgcgcgaagcaatcccggaccgcgtgccaataacagttacggcccagcatcgagttccggatccgcaaagggcccagtccacagctcatccgcccccgccgagctggccgtggtgcgtatttattttgccgaaacgcacattcaatactttcgccagattattaagagcgcctggtacgagaccttcagtacaattggcaacatctgcggcattatagccggtttctcgctgattggcatctgcgagctgttgttttttctagccaaacaattatggcaggcatgccgcgcagagctgcgggccgagctcgcccacatccacgtccaaatccgcaatgcgcaggtagcggaaccggaagcggagcggccgatgaagttgtttatactgccgtaa

SEQ ID NO: 193 - DNA, 1782 bp, Drosophila melanogaster
atgagcgagttgtccagactgcagcagcagcagcagcaggatcaggatcgggagcgtgtttcccaagagctgatcgactgcgatattgactttgtggaggatacgacctccaaggtggaggaggaggccaggatgccaccagccagttccaagcgatacaccaaagccctgaagaaggtgaccaaggtgcagcgcatgctggagcaggccatgatcctgctggccgaggaggaggccaggtgtcggcagcaggagcaggaacagggcaccaaaaggaccaagaagcagctgaagaagaaggccaagaaggacaagaagaaggccaagaagctggccaagcaacaggccaaaaaacaggcggaagagcagacggcggctggcgaggagccctccaacacctccagctccagctcttccagctccagctcatccagttccagctcctccagttcgagctccagctccgaggacgaagaggtattctataacggttacggctggatcagcaatccatggcgccgaggaccacatggccatcacggcttcggtcgtcgtcttggccacggttttggccacaagcatggtcgcaagcatggccacaaacatggtcacgggccgcatcatcatggccgacatggacatcatggacggccgcaccaccaccatccgcatggtcaccactttggtccccattttggaccacactttggacctcacgctgggccctctccctttgacttcgatcggagatcctttcgcggaccttggcatgatcagtcccagttttttcaatggatgggcctgccgtgggccctggacaatgccgcggccaatcggaggagccactcgctgcctagactatctaggcgcgactgtcgtggagatctcggattcggattcggaccaggatacggatacggatatggccaaacgcgtccacgacatggccgtcgactagagagatcactttcccgttcaacatccggttcgctggagaggaagcactgccgcaagccgaggtccagttccagttccagctccagttcttcctcggaggatgagaagaagaggcagaagtgcaagggcaagggaaagggcaaggagaagaaaagacagcagcgctcctcatccagctcctcatcgagctccagctccagctccagctccagctccagctccagctccagctccgatggcgaagtgcagaagattccccatcgacgcgggcaccacttcggacctccacatggccaccaccactttggtccgcgccatgaaggttaccgtccccatcacggcggacaccatggccatcactttggtccacatcatggtccatttgtcgaacatggacatggcccccaattcggaccattctttgacgttccccaaagagaatccggtgaaggaccgcgttttgagcaccagccccgtccggagtttcctattgcccatcatcgaccaccaccagctgagttccctccaggtcgtcgcagtcgttctctgtcccgatcccactgccgcaaggaaaagcaggagagtttccccaaagtcgagagggaggagcgcaagaagggcaaaaagaagcacggaaaacgcgctcatggacatgggcatggacatggacatggacatggccatggacatggacatggacgtgattaggcaatcgcagccagcgtttaagatgcattaagattccttcaatacaacctcccacacatataaccttcaatattactatacatttaacacccagaagcttctattctattattctat

SEQ ID NO: 194 - DNA, 1919 bp, Drosophila melanogaster
ttatcggctaaatttacaaaaaaaaagggaaaattaaaaaattaaaacacttaaataaacgctttcctgggttaaccgcgcacgaatggccacccgtggggccggctcgactgtggtccacacgacggtgacagcgctgacggtggagacgatcaccaatgtcctgaccacggtgacttcgttccattcgaacagcgtcaacatttcgaacaacaacagcagcagtggagcggccccgggggcggatgcagctggcggcgatgcagggggcgtggcagcggctcaggcggacgccaacaagcctatctatcctcggctctttaaccgcatcgtgctgacgctggagaacagcctcattccggagggcaaaatcgatgtgacgccatccagccaggatggactggaccatgagacggagaaggacctgcgcatactgggctgcgagcttattcagacagccggaattttgctgcgcttgccgcaggttgccatggccaccggccaggtgctgttccagcgcttcttctactcgaagagctttgtgcggcacaacatggagactgtggccatgagctgcgtgtgcctggcgtccaagatcgaggaggcgccgcgccgcattagagacgtgatcaatgtgttccatcacatcaagcaagtgcgggcccaaaaggaaatctcgcccatggtgctagatccttactacacgaacctcaagatgcaggtgatcaaggccgagcggcgcgtcctcaaggaactgggcttctgtgtacacgtgaagcatccgcacaagctgatcgtgatgtatctgcaggtgcttcagtacgagaagcacgagaagctgatgcagctctcctggaacttcatgaatgactcgctgaggacggacgtttttatgcgctacacaccagaggcgattgcatgcgcctgcatctacctgagtgcccgcaagctcaacatacctctgcccaacagcccgccgtggttcggcatttttcgggtgcccatggcggacattacggatatctgctaccgtgtgatggagctgtacatgcgttccaagccggtggtggagaaactggaggcggccgtggacgagctgaaaaagcggtacattgatgcgcgcaacaaaacgaaggaggcaaacacaccgccggctgtaatcaccgtggatcggaacaatggctcgcacaatgcgtggggtggcttcatccagcgtgctatcccactgcccttgccatcggaaaagtcgccgcaaaaggattcgaggtcacgctcgcgatccaggacgcgcacccattcgcggacacctcgctcccgatcacccaggtccaggtcgcctagtcgcgagcgcactaagaagacccaccgcagtcgatcctcccgctcgcgctcccgttcgccgccgaagcataagaaaaagtcacgtcactactcgaggtcgcccacgcgctccaattcgccgcacagcaagcacaggaagtcgaaatcctcgcgagaacgctctgaatactactccaagaaagatcggtctggaaacccaggcagtagcaataatctaggtgatggcgacaagtatcgcaactccgtctccaattccggcaagcacagtcggtactcctcctcctcgtcgcgtcggaacagcggtggtggtggagacggaagaagcggaggaggaggtggtggcggcggtggaggcaacgggaaccacggcagccgaggggggcacaagcatcgggatggcgatcgctccagggatcgcaagcgctagtgattgatagacaagcgagacaaacactcccttatatttaattgctctttattttacaaatttacagattatttctaccgatttagtaatgctaatgtgtattgaaaaaacgaacgcgggtaaacaataaatgtaactcttcaatcaaaaa

SEQ ID NO: 195 - DNA, 8073 bp, Drosophila melanogaster
atgaacggagcccaaaattgtaagtctttaaatatattcgtgttcatgtgtgaacactccatgtgtattgcagacgagctgcgcctggtcaaggatggcaattacggctcggagaaatccagtgcccatggcggctgggacggaatggtgggtgagctggtgcgcaaggtaagttcctccgctcggagccattccgtgctccatcctgttcccctttccgcactcactgacacgaaccacctaccaaatgaactccttcgcattgcaggaagcggatattgcgattgccgccatgacgattaccgccgaacgcgaacgtgtcatcgacttcagcaagccgttcatgtcgctgggcatctccatcatgattaagaagccagtgaagcagacgcccggcgtgttcagcttcatgaatcctttatcacaggaaatttgggtgcgtatatgctaggtagtttcccgtagatccccgtttccctatccactatgccccatttcccctctcctttggctgcatgcactttgcctcattggcgctcagtgaagcgttgcaactggagttgaagattttacaccaggatttcgcgactgcgattgtggattgtccaggacctgtatcctcagagccaagaacattttacatcattgctatggcacttggcaccgactcgaaatttgtaattatatcccgtcaccgaaaactaaaagcaactcaggctaaacacatagagcaatgtgtttattttcactttggtaacgagtcaaaatgttgcaaaaatcgcgctgcatacaaatgagtaaagtttttaaacaatttcttcatttctgcttctgtttcaccgccgttgcctggtaatttttacgcttgccaatttttttttcgcccctattttcattattttctacgccgccttttttttgccccgcccgatgcgaagaaggctgtgcgctgctcggggaaaagtttgcggcaaaagtttcgacttgtatatttatttcttctggtttcggcttcaacttggcaccacgtaagctcccaaagtttaatagagtaaacgacaaagttttttgtgcttttgccactgtttggcttttttttttttaacattactcgtataaacagcagcacagcacttcgtgtccatgggagttgttttccccgaaattacgtggccgtcaagttttaaatttaacgctagtctctggtccgaactttgccgctcgaggcttgtttaaataatggcaagccatcaaatttgtatgagcgtttagttgatgtttatgttgcacccgggcgtttcacatccactactaaaaatgttgggtgcgcgttggaaggataactgggtagacaattaaacaaattagatggcgactgctactaatgcgctgtagatgcgcaaaattatgaagacgccgacgacgacggaggccgttaaatttacgcacaataaaaaattcataaaaaggggggcagagcccaaatcagaatctcgaaagtcaaagagtgttgacagcgcgacaaacgcaaaattaaatgctaataaaagtcggcgaacagcgcgccaaagtgaaagctaatgcgtaatttgacatgagctaaaaaaaaaattacaaatgcaaattagtttcccggggtcgggagtaactcaactgagcgcaccgaagatgccagcgaaagtgtagcgggccaaaaaggaaaaggcaaaagccaaggcgcaaagttaacaagctaataaaaaagtcttttacaaaaaatttatcataaattaaatgaagcatttcagctgcacactcactctaactccacaacacacacacacacacacacgcactcaaagcggcacaatcctgcttaggagagtgtaagtgtgtgtgtgtgtgcgtgtgagtgtggtgaagccattcaggcatatgaaagcggcggcgtaaaacgacaaggacacacctttccttccgcacaaaggcgcttgccatggcagccattcaggtgctgacagctcccacacacacacaaacacctgactctgcactgggcgaaaagaaatggtacaagtccataaacatttatatgtccacagccagctgagtcagaaagtttatataaattgtattctacaaaaaaccctattgtcctgtaagggacaatactaaatgcttaattatgagcaaaatctctatcttatactcgaaaatctacgagtattattatgcaaccaatttttttttctccgtcctgttgctgcaacaccaacggtggcaaatgttgccgtagagtcgacatcagcttttctgctcttgtcgatgtccttgggtgctattgtctggctcttcctgccgcgaaagcgcctgccaccccgcgccatcgccccattaggttaatgtttcgttattttctaggaagccccggccgcttccgcttcaattagttaagaaaatttaatgaaaaaagcagcagcagcggcaacagtggctgcttgcacagatgccaggtattccagccagccttccatgtccccagtcacgaatttcatgtctcatgtttaccaaccatccctacagcgaactttcttttctttctctttatgctttcacctgccaacaggtgagcgtcatcttcagttacatcggcgttagcatcgtgctattctttgtgtcgcgcttctcgccacatgaatggcggctcgtgcaacagcagccgcagcaatcacagtcgccaggtgagtactgtacgcacacctgcccttgtggtgccacctgcctgggcatttgaatattgaattaaattgctcgcttaagaaaagttcggaataggcaatcttttaatacgtggattttgcccacgtaaaagcgcttagaaatttgcattcgattagtacaaatgtaattgtcttaatttagaaaaggcaaatgcgttgagcacaatttcatttttatttttacgtaaaccattaaaccattatgtatttgcttatgtattattattatgtatttgcgcaactttatattctaaataccctaacaatggtagtttactattacttagtttcacatgtgatttcaattgttcgttatataaactaagctttaagtttggccataacgtgcatgatttcggttgtaaagatatattatctagaatacttaaacacctataacacatgttcttcgtttctactgattggtagtgatgccgctgccattgtgtcactttttttaagatacaatttaattccccattaagtgcacaatttctttgagtgcatcctaacgagaaaatatgcgtaagccaaaaaagggatgattccaggcggaagacccaaaaatcccgtaattgtatgcatctgctacaacttttgacttgttttgcattcgattttatttgatttcactgaaaattcaattattttaatccaatttgccactggcactgctgttttttttgctggaattcagttgacaatcggaacgagagtcagatacgtacgtatgaactggggaagctagtcacagtgagagaatcagagccggcgatgtggagtggctgttcataacaatctattgacatcctgcaaaacatccttaatgtaattttagcggaaagtaaacaacattctgtatgcaggcagcgtttgcagaatgtgtaaaaacgaagatagataaacagagagacccagtgccacagagtgggacaaaggcgagtgcaaaatgaaacctgacaaggactatgctcctgcatgaaaaaggacacgccgtgccggcaataaaatcagcatccacatcagcctcacgagcaggacttggctggtaaaaggacgaatgtcatcacatctccacccgacagtcaatggctttgcaattgaagcaaatggggaacagagacttggctatgggtttgattgcatatcaattagagcaggcgcaaaaagccaagccaaacgaaatgattgaaacttggacagtcgacatgggcacgtactgacagctcaccactccctgttttccgaatccaattcacactgggcgaccgaactaaatttagaatgattaattatgttcttgaagactacttaaaagcttaagtatgatcaaaatgggataccacttcatcatctatctgaaacacatttttatgttattaccatatgtattatatatatttagagaagtagaccttttatcgcaaattgattggcttaatgatttaaatttcacatagtctaaatgttttctgtgtctttagtttagtagtattgcactttttctcactgtgcattagcagactgcgtttgccgtctgcggtttcgttttgcggccaactcaccgcccccttttccgcctgattccctttttagatccgcatgcacatcacgaacagcttgccaatcagcagccgcccggcatcatcggaggtgcaccactgcccgctccaccgggaccacccacaccgggcgcccaaacggcagcaggagcagctgccttgcaagcggccctctccgccggaagtcccggatccggaggctcgtcctcggcggtggtgaacgagttcagcgtttggaactccttctggttctcgctggccgccttcatgcagcagggatgcgatctgtcgccgaggtctgtatccggacgaattgcagccgcctcgtggttcttcttcaccctgatactcatctcctcgtacacggccaacctggccgccttcctcaccgtggaacgaatggtcacgccgatcaattcaccggaggacctggccatgcagacggaggtgcagtacggcactctgctgcacggctccacatgggatttcttccgggtgagtagacattctgacaggtaactatgcactgagggaaagtaattggaccataagttccttgatttaaaagtgggtcaccatatatcctagaaggattaacagtctgcgaaagttcgaaagttataactgtcttaaagtagttgcttataatgtgaatacaaacacaaatcacatccttaatattgttaaaattaatagaaaatgatctaagaatatattctttctgtatacctagataacttcccatttgatagcctacttttggaattgcaagtcccgattgcctagcaaccaaattaatttgggggtgctcatgtcacactcatttgacaaccgcacaatggccaaatcaaagacaataaaagccaacagtcaagacctagaaaaccattggaatttgctggctgagccttttgagacgtcaaaattgagagaggccccagccgggccacgaattaatttgtgttagacgagaaataaaaagcaatttgccgctgccgttcagcaatccacattccatttctccggccgtcaatcgggccaaaaatgcaaaagaaatgggacgcaattctattttttatggctacatttatttgagatgcttttaagcacacttacgctctgctgccccgccatgtgtgcagatatatttctatatatttgggtatactcgtatactatgtacgttcatatataactacgacaaccgttggtagccgactaggcactcggtttcagcattatactgatggatatctgggcaaaacgggtgtccctatacgcatgcattcgattgtcccgggatgccggggcgtatacgctatatccgaattccgtactttatatttacccgttcgccttttgtgtgcccgcagcgctcccaaatcggactacacaacaagatgtgggagtatatgaactcgcgcaagcacgtcttcgtgccaacctacgatgaggggattaaacgtgtgcgcaactccaagggcaagtacgccctcctggtggagtcgcccaaaaacgagtatgtgaacgcccgcgagccctgcgacacaatgaaagtgggccgcaatctggatacaaagggatttggcatcgctacgccgctcggttcggcgctcaagtgagtacactgcggtgaaatgggctcaacttaagtgggctgttcagtttttcacttcgaaacatgtaaaaatatgtaaaaaatagaatttttaaagcataaatcatgaaatttatacgaaaattaaatattttaaaatattttatttatataaatgtcaaagattatttaatgtgtagttacggaatctgtttgacatcggggagtcagaaattgatgccttttacgggcgagaaactggggagttttcagccagagatgaaagttaacccacatacttaacaaagcgccaccattctcatttccattgccgctccccattcaacagggaccccatcaatctggccgtgctgacgctaaaggaaaacggcgagctgatcaagttgcggaacaaatggtggtacgaaaaggcggaatgcagcacccacaaggacggtgagacatcgcatagcgaactttcgctgagcaatgtggccggtatattctacatcctgattggcggcctgctcgtcagcgtattcgtcgccattctggagtactgcttccgcagcagggactcgcgttccgcgtccagtggttccggcatgggcttgggcatgggactgggcggcggcatgagtggcggtagtctgggtaaggccaatggatccatgatgttgggtccatcgagcgccgtgcccggcgggatgccgtcctcacatcaaaggagcacgctgacggacaccatgcatgccaaggcgaaattgactattcaagcgagtcgcgactatgacaacggacgcgtcggggtaagttgcacttgaaaaagaacatatttgatattaaagtaatttaaaatgaatactggcttaaaagtggcttatttaatataatctaaaatttaatacttgtaaataaaataaaatgtaaataccagttttatttttcctagtgtacggcaccagtttatagagtgctagaattacgttctatttctaacgcacttgcgatgttcatccaagcattgattctaatccacgcacagtatctcaattgcgcatcgttgcagtactatccgcccgcccagctctcggccacgccccccgacgccggggactccctgcacatgaacgcccacgggcaggtctgacatgagcatgcgcaggagtcgcgactctgacgcactccctgcgcgcccacgatccgccgaataatggccaacagccgccaagagacggagaagatgatgggcggcggtcacggcggcacagtgaccgtatccgttccggccacctgttccagcagcatgaacggcagccacgagggcagtctcgcattgtcgccgagcagcgggagtgccaccctgatgcgccactcgccggacatcaaccagcatccgtatggcaagtaagtgctcggatgggttgttagctataaggacacctagtcgtaagtgccggacgagaagccgcaaaccaagcacacgcagtaacacatcgtcagaagcttaaaaaacgctgcatactttgaagcgcggcatttttaacaggattttacaattttgacttgagaaaaaaatttagttaaaaatttagctgtttaaaccacatttttaaaaaattataaatatttttatcattacccaagaccacttgttattagaatgtaagctttattcaaaaaatcgacccatataagacacgaaatcattaaccagtttcgaaaatgcgttaaattttgcaacgcacttaaatcgtttcatccaaaaatttttgcgttattgaaaagtgcaagtaatttgaaaattaaatttcaatttcgatttccaaagtgaaaatgcgaggaaaatgcgttgaaaaatgcatagctcgcgttgagaataaaatggatagttattaatttgcaataagtgcgcaagaatttcacaataaatctcatagccgtgcgatgcagcaaagtatgcagctttatttatgcggccgcattcaaataattgcgctgcgcaatcatttggcaaacaatttttttagagcctgtcggcagggcaatgcaaatgaatggtataaattattgcattactgttaacagtcagctgagctgggcaggatcggattggattggatcggatcggttcggttcggttcggtttggatga

SEQ ID NO: 196 - DNA, 570 bp, Drosophila melanogaster
atggtcagggacaggtggcgcaccggaaagcggtggaccggaccacatatcgcaggacaatggaataatctcctggggaccagaccacatgaatataaagcccggcatggacgcagcaacagtttcaacaacaatgaagttcatcgatcaccgccgcagcaggcatcgcacgtcggcgttccatatccacgattgccacaacgtgtgggtcaacaagtgggccaggagccaatcagcggcatgatttcccaaaagccaccgccgatcccgggacagggaataccatgcaaaagcagcctcgccgcgtcaatacccacatccccatcagaatccgcagcaccagcatccgcaacagactccggccaaccaaactgccccagcgcagctgcgtggaatccatcacgccagttttgtaccgatgaaagcggcttacgatggcggacgtatgcccggtggatccatagcggtccagttttttggcacttcaaacctgcacggcctgttaactttgcaagttcttacgacagcagctgttatgctgtcaacgcccaccctaccatgaccagttaa

SEQ ID NO: 197 - DNA, 11157 bp, Drosophila melanogaster
atggtatcaaaaagcaataaaaagaaacaagtgtctcagcagcagcagtcgtctacgtcgccgccgccagccacatcgaccacaacatcaacgtcgtcggccgaggccacgaagctaaccaaaaaactgggtcccgatgcgttcgccactctgaccaccagcaacagctccagttccatgcagcacgaatcggtgacgtacggtggtgatcctgtcgggccgagcacttcgggtgcttctctgccagcggctggagttaggagctacagcagccgcagcagccagagcaagagcaaggcatcgcagtcgcattcctcctacacagagcaatctcagtcccagctgcagtccgagcagtacagcagcaagatctcgcgggattatgccaatcagaagatcatatcatcgattgatctgctcgaaagtgaaaagaaggagccagtattctcggtgcccatcgatgtggtggagatcgcaacgccaacgctctccgtctccgccagcgggggcagtgtttcgaaaatgttcacgtcctcgtcgatgtcttccagtcaacagcagcagcaggccagtagctccagctcgtactttgaagccacaaccagttccagccggagcgctaacgaaacgctgattgccagcgagagagccgacacggctaccggtatgacatcatccgggccgaggaaacaggttggcttcgatacagacaccaagacagtgacaaacgccaccaccagcaacagcaacagcagcagcagcagcacaagcacaaacatcaacatcaacaccagcggcagccgcagcagcaatttgagcgaatctcagagcgtgccaaagctgccaatgagcggaacagctgatgctcccgcatcggtgacgtcgcaaggctaccccgaaccggttgccgcgtcgtctggcgcgaccacaacaaaggcgacgtcatcgacgcgacgcaacgataaactggaagtggccagtgctaaaacagctgttgatagagctacgtcatcgtcgtcgatggtcgaccaaaggtccaccaaagaggttagcgagagttcagtcttgaaaagctccaccagcagcaagcagtcaaagtcgtcgtccaagaaagaggtgtacgatgtgaagaccaaaacctggacggagtacagcgatggcagttctcatggcccgagtaagacccggccgacctttgagcgttatgtcagcaaggaatccgatggcacatccaaagtgacgtacaagaagaaaatctacgacagacgcaacaatcggtggcgcgtggtggacgaacggacggtggatagcaccgccgacacgggctatcccgaaatagtcgatgatgtcattaacacaacaagaaccacatacaccaccaaggtgtacgacacgaagctcggcaagtggactgttgtggacgagaagtcgttcactgatacgaaagcttttgtgcccaatgacattgctcgtgaaatcgagaaagataataccgatgttgcaaacataacgactacaacggaggtgacgaagattttcgatgcgagcatcaacgactggcgcgttctggacgagaaggtgcacacggatgttattgagaagatcgtagaggctcccaagaagaccatttacgtggacgagtttgtggagattgagaagaacacatcgatatcggagaacaacgaaaacataacactgaacttgaaggagacatcgaaacacaaaaatattaccgaaaatatttatgatgaaatcgattatgtgcgcactgataagcaacgcctgaacgactcaagaacacgtggagttgcaaaaaacaagtcaacaacacatagtgaaagatgcatttgtgaaatctgcacatgcgggcggcaccattgctcaagcagtacaacgaagtctacggaaaatacggttattcaaactgaagataacgttgacgaagcatatacaaggatacgtacaaatacatggtcgaaagaagataatggaaacattcccaagcaaaacgaagacattctagtggactatatagtcattaagaagccagaagacaacttaagacctgagggagactttatagttcctccgaaggagccatacaagccgggagaaaaacgtgaaaagattgtgcataccgacaaccttcgtacagaaggagaaatgacttttgtggagaaggaggaataccaatatacagttcgtccgggatacgttaagcctacagacaatctaaagccggaaggcgagttttacagtccagaaaaacctaagtatcaaccaggagatcggccatctcaagtgcgacaccaagacaatctaaaaccagaaggcgaattttacacgcctgagaaaccaggatacgctccagccgatcgtcccacacaaaaaaggccggtggataacctcaagccggagggagaatttgtttcaccagaaaaacccaaatataccccagccgaaagaccagaaaaaataataagaagtgataacttgagaactgaaggtgaaatgacatttgtggagaaagaggaatatcaatatgtcacacgaccgggacaagtcaagccaacggataacttaagaccagagggttcattttatagtcctgaaaaggcaaagtatcgccctggcgaacgtccatctcaagtgcgtccagttgataatcttaaaccagaaggtgacttttatacacccgaaagaccaggatttgaatctgcagaaaggccagttcaaaaaaaaccggaggacaatctaaagccagatggggaattcgtacggccagagaaacaagtttacaagccggccgataaaactgaaagaattattcgaaaagataatcttcgtacggaaggagaaatgacgtttgtagagagagaagaatatcactatgtggtacgtcctgaccaggttaaaccattggacaatcttaagcctgagggagaattctacagtcccgagaaacccaagtacaagcccggcgaaagaccttcccaagttagaccagaagataatctgaggccagagggtgaattctacacaccggaaaagccaggattcaggccagctgaaagaccagtacagaaaaaaccacaggacaacttaaagccggaaggcgaattcgtgaagcctgagaaacaagtttacaggccggccgataaaacggaaagaattattcggaaagataatcttcgtacggaaggagaaatgacgtttgtagagagggaagaatatcaatatgtggtacgacctgaccaggttaaaccattggacaatcttaagcctgagggagaattctacagtccggagaaacccaagtacaagcccggcgaaagaccttcccaggttaggccagaagataatttaaggccagagggtgaattctacacaccggaaaagccaggattcaggcccgctgagaggccagagcaaaagaaaccagaggacaacctgaaacccgagggcgaattctacagtcccgagaaacccaagtacaagcccggcgaaagaccttcccaagttagaccagaagataatctgaggccagagggtgaattctacacaccggaaaagccaggattcaggccagctgaaagaccagagcaaaagaaaccagaggacaacctgaaacccgagggagaattctacagtccggagaaacctaagtacaagcccggcgaaagaccttcccaggttaggccagaagataatctccgaccagaaggtgaattctatactccggaaaagccaggattcaggccagctgaaagaccagtacagaaaaaaccacaggacaacttaaagccggaaggcgaattcgtgaagcctgagaaacaagtttacaggccggccgataaaacggaaagaattattcggaaagataatcttcgtacggaaggagaaatgacgtttgtagagagggaagaatatcaatatgtggtacgacctgaccaggttaaaccattggacaatcttaagcctgagggagaattctacagtcccgagaaacccaagtacaagcccggcgaaagaccttcccaagttagaccagaagataatctgaggccagagggtgaattctacacaccggaaaagccaggattcaggccagctgaaagaccagagcaaaagaaaccagaggacaacctgaaacccgagggagaattctacagtccggagaaacctaagtacaagcccggcgaaagaccttcccaagttagaccagaagataatctgaggccagagggtgaattctacacaccggaaaagccaggattcaggccagctgaaagaccagagcaaaagaaaccacaggacaacctgaaacccgagggagaattctacagtcccgagaaacccaagtacaagcccggcgaaagaccttcccaagttagaccagaagataatctgaggccagagggtgaattctacacaccggaaaagccaggattcaggccagctgaaagaccagagcaaaagaaaccagaggacaacctgaaacccgagggagaattctacagtccggagaaacctaagtacaagcccggcgaaagaccttcccaagttagaccagaagataatctgaggccagagggtgaattctacacaccggaaaagccaggattcaggccagctgaaagaccagagcaaaagaaaccacaggacaacctgaaacccgagggagaattctacagtcccgagaaacccaagtacaagcccggcgaaagaccttcccaagttagaccagaagataatctgaggccagagggtgaattctacacaccggaaaagccaggattcaggccagctgagaggccagagcaaaagaaaccacaggacaacctgaaacccgagggagaattctacagtccggagaaacctaagtacaagcccggcgaaagaccttcccaagttagaccagaagataatctgaggccagagggtgaattctacacaccggaaaagccaggattcaggccagctgaaagaccagagcaaaagaaaccagaggacaacctgaaacccgagggagaattctacagtccggagaaacctaagtacaagcccggcgaaagaccttcccaagttagaccagaagataatctgaggccagagggtgaattctacacaccggaaaagccaggattcaggccagctgagaggccagagcaaaagaaaccacaggacaacctgaaacccgagggcgaattctacagtcccgagaaacccaagtacaagcccggcgaaagaccttcccaggttaggccagaagataatctccgaccagaaggtgaattctatactccggaaaagccaggattcaggccagctgaaagaccagtacagaaaaaaccacaggacaacttaaagccggaaggcgaattcgtgaagcctgagaaacaagtttacaggccggccgataaaacggaaagaattattcggaaagataatcttcgtacggaaggagaaatgacgtttgtagagagggaagaatatcaatatgtggtacgacctgatcaggttaaaccattggacaatcttaagcctgagggagaattctacagtcccgagaaacccaagtacaagcccggcgaaagaccctcccaagttagaccagaagataatctgaggccagagggtgaattctacacaccggaaaagccaggattcaggcccgctgagaggccagagcaaaaaaaaccagaggacaacctgaaacccgagggcgaattctacagtcccgagaaacccaagtacaagcccggcgaaagaccttcccaagttagaccagaagataatctgaggccagagggtgaattctacacaccggaaaagccaggattcaggccagctgagaggccagagcaaaagaaaccacaggacaacctgaaacccgagggagaattctacagtccggagaaacctaagtacaagcccggcgaaagaccttcccaagttagaccagaagataatctgaggccagagggtgaattctacacaccggaaaagccaggattcaggcccgctgagaggccagagcaaaagaaaccagaggacaacctgaaacccgagggcgaattctacagtcccgagaaacccaagtacaagcccggcgaaagaccttcccaggttaggccagaagataatctccgaccagaaggtgaattctatactccggaaaagccaggattcaggccagctgaaagaccagtacagaaaaaaccacaggacaacttaaagccggaaggcgaattcgtgaagcctgagaaacaagtttacaggccggccgataaaacggaaagaattattcggaaagataatcttcgtacggaaggagaaatgacgtttgtagagagggaagaatatcaatatgtggtacgacctgatcaggttaaaccattggacaatcttaagcctgagggagaattctacagtcccgagaaacccaagtacaagcccggcgaaagaccctcccaagttagaccagaagataatctgaggccagagggtgaattctacacaccggaaaagccaggattcaggccagctgaaagaccagtacagaaaaaaccacaggacaacttaaagccggaaggcgaattcgtgaagcctgagaaacaagtttacaggccggccgataaaacggaaagaattattcggaaagataatcttcgtacggaaggagaaatgacgtttgtagagagggaagaatatcaatatgtggtacgacctgatcaggttaaaccattggacaatcttaagcctgagggagaattctacagtcccgagaaacccaagtacaagcccggcgaaagaccctcccaagttagaccagaagataatctgaggccagagggtgaattctacacaccggaaaagccaggattcaggcccgctgagaggccagagcaaaagaaaccagaggacaacttgaaacccgagggcgaattctacagtccggagaaacctaagtacaagcccggcgaaagaccttcccaggttaggccagaagataatctccgaccagaaggtgaattctatactccggaaaagccaggattcaggccagctgaaagaccagtacagaaaaaaccacaggacaacttaaagccggaaggcgaattcgtgaagcctgagaaacaagtttacaggccggccgataaaacggaaagaattattcggaaagataatcttcgtacggaaggagaaatgacgtttgtagagagggaagaatatcaatatgtggtacgacctgatcaggttaaaccattggacaatcttaagcctgagggagaattctacagtcccgagaaacccaagtacaagcccggcgaaagaccctcccaagttagaccagaagataatctgaggccagagggtgaattctacacaccggaaaagccaggattcaggcccgctgagaggccagagcaaaagaaaccagaggacaacctgaaacccgagggagaattctacagtcccgagaaacccaagtacaagcccggcgaaagaccttcccaagttagaccagaagataatctgaggccagagggtgaattctacacaccggaaaagccaggattcaggcccgctgagaggccagagcaaaagaaaccagaggacaacctgaaacccgagggagaattctacagtcccgagaaacccaagtacaagcccggcgaaagaccctcccaagttagaccagaagataatctgaggccagagggtgaattctacacaccggaaaagccaggattcaggcccgctgagaggccagagcaaaagaaaccagaggacaacctgaaacccgagggcgaattctacagtccggagaaacctaagtacaagcccggcgaaagaccttcccaagttagaccagaagataatctccgaccagaaggtgaattctatactccggaaaagccaggattcaggccagctgaaagaccagtacagaaaaaaccacaggacaacttaaagccggaaggcgaattcgtgaagcctgagaaacaagtttacaggccggccgataaaacggaaagaattattcggaaagataatcttcgtacggaaggagaaatgacttttatagagagggaagaatatcaatatgtggtacgacctgaccaggttaaaccattggacaatcttaagcctgagggagaattctacagtcccgagaaacccaagtacaagcccggcgaaagaccttcccaggttaggccagaagataatctccgaccagaaggtgaattctacactccggaaaagccaggattcaggaccgctgagaggccagagcaaaagaaaccagaggacaacttacggccggaaggagacttttacagtccagaaaagcaaccttacaggcctggagaacgtccaacgcaagttcgacctgaggataatttgagacccgaagggaaattctttgctccagaaaagccaggatataaggccggagaccgaccggtacctaagaaacccgttgataatctaaagactgaaggcgagttctttactcccgatcgaccaaaatatcaaccagccgatcgagtaactgttgtaaggcagaaagataacttgaaggtggaaggagaattctacgttcaagaaaaagaggtctttaaaccagctgaaaggcctaaacagaaaaaacctcatgataacttaaaaccagagggcgaaatggttataccggaaaagggcaaatataagcctgccgataaggtgacaagagttattcataaggacaaccttcgtagtgaaggagaaatgactttcacggaaaaaactgagtaccataatgttgttagacccaccccagtgaagccagaagataacctgcggacctctggaaaactttacgtacctgaaaagcccgttcatacaaatggtgaacgccccgagccggttaagcctaaagacaatttgaaaccagaaggtgttatgtataccccggaaaaaccgaaatatgagcccgcttcccgtccagagcagaagaagtatgccgacaacttgaaacctgagggtaagatgcacattcccgaaaaggatgggtaccggcctgccgataaggtgaagacggttattagaaaagataatttaagaaccgagggcgaaatgacattcacccagaaggaagaataccatcatgttaaacgaccggaacaagtaaagccaagtgataacctaaaagtcgaaggtgaattctatacacccaataaaacttcctttacacccgccgagcgaccagttcaaaagaaaccaaaagacaatcttaagccggaaggagaattttataagagaacagaccgaagcgagaccgatagcaagatggttacagaaaccattaagagagaaacgccaaaacgtcctgttgacaatcttaagctagaagggtctatgacagtgaccagaagaaatgattataaatctacggcgaacacaacggttgacaaagtacaacgtactcaaaaaattaaccacaatagttcatctattactttgggaagtgacacaacaatccgaaaaacaacaaatcagatgaactatgtttctggcaaggacgctgtcaaacaagtcgattcgaatggccaaaatccggttgatggtctcattgttgtatctacaacaaaggtaactactgtcataggagggcgtcataagaaggaaccagaaaccgagtatgtcaagaggcccgctaagataaacgtaatagaaaatgttgcgaaaaataccacaacgacaaatatcgaaaacactcaaaacatccataaggaatccacgtccttgcaaagaaatcaaaaggtcattaaaggtacggaaattattacgggtacggatgtatccagtaccgctattgaatctaatcgtagtcatttaaccgacaagaacactggcgacataagctcaaaagttatttccggtggctcagtctctaataacgtaacgggtgaaacatcgtctcgcgtaatttctggcagaaatgttacgtctaatataactgagaattcgacttcacgcgtgatgtctggcagaaacgtatcgagtgatgcatttggcgaaaccaccactcgtgttgtatccggaagatcggccgccaataacattaccggcgatacaacaagccgggttctgtctggaagcacagttggacataacatcagcgaagattcaacatcgcgaaccgtctcagggggtagaagttctgccaacaatattgtgactggtagcacatcctcgcacatgaccacttcaaagcatttccatcatcgaaagagcgaattctcgtcagaagccgacgtctccaatacggtcttccatcgcaagaacgtaaccaccgattcgaatacagccaatggcagcctgacgtccaatggcaagatgcagcgcaagagcatactgaatctacacgagcagccatcgagcaccaccacctatggtggcgagcgtcagagttacagcagcatccatcgccaaaatcgagactctgacgcaaatgcaactttttcgaccgagcgtcgtacgtgcaacgtgcacaaagagaacagggagcagactgtgaagaactcatcctcaatgacccgcatcatttctggtggaaccagcggttcgaatgccgaacgatcaacggtgacacgcagccatgtttcgggtggtggcggcattgatttttcgtctcaatcacattcccacaccggaagccataccagccgacatcgaggaggaaatcagcaggtgtccagcttgggcggtggcatcgatttcccctcctacagtgcccatggccatggcgccgagcgtgtggtaacccgtcgaggaaatcagtcctcaattagtctgggcaatgaaaagtttaccggctccagtttgtacaagagcgaatatataactgccccaaaaacgacgtgtgctgtgcataagattaaacaaggtgcattccaacatacaagaagtactcaagaacataagttcttcaagacctcaaactaacacagcccgactacgagtatattatacatatcctttgctttactaatacagaaaacccatattaatgttatcataagcttccatgacaatatacgttttataaaatatacaaaccaatccgaaaatgaatattaacaataaagacaacattcttaaatcgac

SEQ ID NO: 198 - DNA, 602 bp, Drosophila melanogaster
attgttagtacatcactattttgtgagactttgtttatgttttaatttttctgcggtaacttgaaataaaaaacgcgccaggatgtcgtatatgctccctcatttgcacaatggctggcaggtggaccaggccattctctccgaggaggaccgagtagttgtaatacgtttcggtcacgattgggaccccgcctgcatgaaaatggatgaggtcatgtacagcatcgccgagaaggtgaagaactttgctgtcatctatttggtggacattaccgaggtgccggacttcaacaagatgtacgagttgtacgatccttgcacggtgatgttcttcttccgcaacaagcacatcatgatcgatttgggcacgggcaacaacaacaagatcaactggccactggaggacaagcaggagatgatcgacattgtggaaacggtgtatcgaggtgcccgtaagggccgtggtctggtagtctcgcccaaggactactctaccaagtacagatactaaggtgggtcgcgtaccccgccgacttagtttaatgtatcccatttaggcgtaacaaattgatgatcccaaatagaagcgactgtctcttggc

SEQ ID NO: 199 - DNA, 3220 bp, Drosophila melanogaster
actgttacgtcaaaataaagtagtgaaaaggtgcaaattgcgtgcgagttaaataaaaactatttgccaggcggaaaaacgcgttttcatcgggatctttgagcgtcccagttgttgcggaacatgaggacactggcgggactaattggtagtggcggtagtggccataggacctctgtgagcaacgcttgagtccagatatatccctccaatagtgtgacccataggtagcctggggtcatccaaacagacctcgacccccagtgactgtaaaaccgcgtggctgccttagccaccgaaatccccgttcaagttcaagccgatcttaccttcgtgagcgatcgtttccaccacagtcggccagtgggattcccaccacacctgaccgcgcgcacgcgcatcgattcaaaaatccacaaaaagcgaaaacacttcgctggagctgctgaagccaaacgcaagcaaaccgcgcttcgccgtcgcctcgaaatcgttagtccatcgataccccgaactcgccacacaatcgcgcgtttttcaaatcctgcgagcctgcaaaaaacataaacaaaacccactataatgctgttcacctgttgaattctgtgcctgtgtctcgatcaagaagctgcatcctacccttcccacaaaaaaaaaaaccatcgcataagccctgctacttacaaatcctcacaaacaaaacccacaaaatggcctgcttgagcacttccggtcgcgtcgtgtgcggctcgcgtcgccagcaggcgcacaagctgctctatcagctcttcggatcccggccaggatatacagccccgtccgccgcaaccggattattcagtccgcccaaagttcaacagcaggccatgcgactctaccacggattaagcttcagcatgggcaaggattaccccgatctgctgcaaagtccccacaagtgcagccaatcgctgcagtactcgcaaagttccaaggcgaatctgaggcagcacagctcggtccacacacaacagccagcaggtcctgtgagggagttccagatcgatccctacatcatactcgatgacgacctcaagtacttctacgacgatgtgcgatatctgctgaaatcgggcacatcccagccagagttggacaccattgccagctattacttcgatggccagggcaaggctctgcgacccatggttaccatgctgatggccaaggcgataaactatcacctgaacaacgagtcacaccaattagtacacaaacagcgacagatcgccctcttttcggagatggtgcactcggccagtctggtccacgacgatgtcatcgatcagtcggacttccgacgcggcaagcccagcgtgaatgctctgtggaaccacaagaaggtcacaatggctggtgattacatcttatcgattgcctcgattatgatagctcgtctgcgcagcgatgatgtgacgatcgtgctgagtcagatcttgaccgatttggtccaaggcgagttcatgcagctgggctcaagggaaacggagaacgagcgcttcgcccattatctgaccaagacatacaggaagaccgcatcgctgatcgccaatgcactgaaggcgaccgccgtgattgcccaggccgacgacaacgtggccgaggtggccttccagtacggacgcaacatcggcttggcctttcagctggtcgacgacatgctggactttgtctcctccaccgagcagatgggcaagccgacggcggcggatttgaagctgggtctggccaccgctcccgtcctctttgcatgcgagaagtaccccgagctgaatcccatggtgatgcggcgcttcagcgagcccggcgacgtggagcgcgccttcgagctggtgcacaagtcgcacggtctggagcagacccggtttctggccaagaagcactgcaacgaggcgatacggctggcccaggagctcacggagtcgccctaccagaagggtctccaggtggtcgccgacttagtcatcaaccgcatgaagtagagtaccgagcacccgaacaccctaacataaaccatacacgtaatgcaataataataatattaataataatattgttatgtaggcccattgatgtttggattaagtcctgttcagccggcgggccaatttgtaaacaagaattattatttagtttttaggcatttgttgttgacactgtaaataattgcataaaaaaacctaatcaacacacactaaatggcaacgatcgctgtacataacataattacaagatgtttaatgaatttttgacaaattttgtatgcaatgtttttcgacaaatttatttatatgtatagagagcgaaacatgagccaaaagccaacaacaataggggaaacgagaaaattgtacaaacatttcatcaaataaatgaatggaaatgggttgccaggcgagcaccaaatgtggaatctactttaaaatgaaaatgtttattagtcaatgcaacaaagaaagccagtgtgtagagcgatatttttaatacgaagcacgaggagcataattggtttattttatattaatacttgatttagggcatttcatgcctaaatggttcaatggtcattgcctgcactctgtttaaaatcccttccgaccgcacaaacttgtaacttaaagtggaaagcccgtagtttagctggattaaataaaatattttgaaccattcgcgcatgaaatgcatattataatatgttctataagaaatgtaacgaggattgtatgtgaaacaatgctgcccagtcttaattttaaatctttcttctccgcctctaatgcaatagtaatttaaaagacatttgaaacgaattcgaaccgcaaaccccaaatgttgaaatgttctacaaatctttttagatgtaagtttttattttaatttataaacacaacctcagttaagttagtcagcgaaattcgtttttttgtccgtttagttttgatgcaaattcattgggctcctttacagcctgctctacactgaaagaaaggcaaatgaaagatataatgcagaaatttgctggctagttaatcaatacaattgggtgctgacgacgatatacccacatattttagagtgcgaacgacaaaataatgatacagatgttgatattgatacatgtaattacgatatttgtatacctaatgagatgaataaaaattcgattttgtaaaacaagcaa

SEQ ID NO: 200 - DNA, 7232 bp, Drosophila melanogaster
atcgagtgtcacacgggaagaagaagctgcgaaaagaattttagaagaaagcaactgcaattttgtcataatcggagctgcaattcgcaatgaataatggaaactagacaacccagttccggtgatgatctaaagccagagctgtacttcctcatttccaagttcctggccgcgggaccgctggaggagacggcgaaggtcttgatccgggaactcgaagagaagaaggttttgccgcgtcgtctcgattggcagggaaacgagcatgagcagacctttgaggaattggaacgaaagtacaagcacattggcgccaatcacttgcttgaaatatgcagtcgtctgggtccactggtggatcgcgagcttccgcccagtgttccgggcatcaactcgctgttgggtactgggcgccagaacctcctgcgcaccaaggaaaccgtctactgccatcgctccttaagggactactgcacccgcctgaatggagtctcgctgccggattcggtccttacaaagccgacccacaacttagatcgcgttctaactggacgggaacacggcggggaagtccgtcgcaagctcctcgtgcccacggacctctaccgccgaacaaaattgctccgtcgcactgtgggccacctgtcctcagtgtactgtgttctgtttgatcgcacaggaagatacatcatcaccggagccgatgatctacttattaagatatggtcagcggcagatggccgcctgctggccactctgcgaggcgcctcatccgagattacagacatagccattaacttggacaatacgatgctggctgccgggtcattggatcacatactaagagtgtgggacatgcaaaccacatcacccatcgccgtactgtctgctcacacgggcatgataacttcggttaacttttgtccgtcgccacgtagcgatctgaaatatctggtgactaccagcacagatggatcgatcgccttctggcaatactcaacgccgcgcgggcaaaagatcacgtttgccccgaagccaacgcagtatcatgagaaactgcggcccggacaagctcagatgatgtgtaccaccttttcgccaggaggcatttttctggccgctgggtctgccgatcaccatgtgcgcgtctatatgatgggcgaggacggtccgaagcgaatattggagacggaagcttacacagatgccgtggactcggtgcagtggtcgcatcgtggactgagatttatatcggggagcaaggacggcacagcacacatctggacgtttgagtcgcagcagtggaaaagttccaaactatgcatgacggagcgtctggccagctgcccggaaccagaggagggaaagaggcttaaggtaaccatggtggcttgggatgcctcggaccgttatgtcatcaccgccgtaaacgattttactataaaaatctgggactcgaagtcagccaagctgcatcgtgttctgcgtgggcacaaggatgagctttatgtgcttgagtcgaacccaagagatgagcatgtcctgctttccgccgggcacgatggccaggtatttctgtgggacatcgagcagggcgtttgtgtggccaacttccttaacgacatcgatggccaaggccatggcagtgtctttgatgcaaagtggtcaccggatggcacaatgatagctgccaccgattcgcatggacacatcctgatttttggtttgggcgtgtgcattgaaaagtacaaaatgcttcccacggagctgttctttcacacggattttcgacctttattgagagatgcgcagcaccatgtggtggacgagcagacgcagataatgccgcacctaatgcccccgcctttcctggtcgatgcagatggcaacccgcatccatcaaggtttcaacgatttgtgcctggtcgtgagagctgtagcctagaccaattgattccaaatcttacggtaggcgtggatggcgtagtaatcgacgatggaggtgcaggtggagatgctgttgtggccgctgcacccgctgaagctccgccagccgcattgccccctgctgctgctggaggaccacagggagctaactactcccatatcgaccgcatgattgcagccttggccaatcggcagtcggttaatgtaaatgccaatgatgccaatccgaccaacggcaaccagtccttcgaacgtttgaccaatcgtcaaatgccggactccaatggcaggcaatcgtcacgtggcaatgtcctgggtagtcgtttgagcacgcctcgccaaggatggggtgccgcagctgccgcgccagttgaggatcaagcagggccgtctcaacctccggcagaacctgcagccgaacctggccaggcacaagtccaacaggcgctgcctctgaaattcatccgtcgcacttatgtgcgtcccatgaagtatccccagttgcaaaaccttaagcagactatttactctgccggtcagtttgaaaagcaggagtacaaacgcgaaatgcgacgccgacccatcatgataaacactgccagtgcagcatcttcgcagcagccaggaagcgttggcaggccacgaaacacacgtggcaatggcggcggcgcaagagctggacgaagacgtggcccccagccagctggcggacagccacaacccgcttatcgcacccgcgctgttcgggatcaggagccggagcactacgatgaggtagcgccgccacccgaggaagaggaggaagatgtgtccagcaactcgtccggcgacacgagctactcgaatgtggaagaaaacctagaggacagcagcgatgagtcggaaacggacagttccgattactctgactgggtggcggatactcctggcccgaatctggaaccaccaaaacgatccaagcgtaagccactctcacggcgaccccggagtagtgatgacagcagcgatgatgagcgagcgggcagatccagaggtgggcaggttacggcccggaaggttggacgtaaaactgttttgtttccgcccacagatgcaaatggagagataccggagctttatcgtcccgctgagtggctatctgaggtgattccacgtaaggcaccctattacccccagatgggtgatgaggtagtctacttccggcaaggacacgcaaagtacttggatgcagtccgcctgaaaaaggtctacaagctctcgcacagctcggagccgtggaactttcacacactgcgcgaccacgagctggtgcgtgtgattggaatcaagtacgaaatccgcccaccccgattatgttgcttgaagttggccatcatcgatgaggagggcaacatgacggggacaacgttcaagatcaagtaccatgacatgcccgacgttttggactttttagtgctgcggcagaccttcgatcttgcagtgcagcgcaactggagcattggtgaccggtttcgctgcatgattgtcgatggctggtggatgggtcagattgaatcgcgccacgccctctctgctgacttccccgactcgtccttcatgtgtttccgcgtgcgctgggataatggagagtatgagtttatgagtccctgggacatggaacccatcgatcagcaaagagtaccggacgaggtgggaggtgctgttccagttctaccggaggagattcgcgccactctataccagcccaagtccgaggaatggcacagaggggatcgcgatggcacctgcaggcgaattatcaatggattggagcaggttatgcgtctctctatcgcagagcatttcctggcccccgtggaccttaacatatatccagactacgcttatttgatcgaatatcccattgacctgaccacaattaaatctcgctttgagaatcacttctaccgcagaataacctcagcccagttcgatgtacgctacctagccaccaatgcggagcagtacaatcgccgacacgcaattatcgtcaagcattcgcgaattgtgacagatctttgtttgaggatcatcagggaaccggatgagatagatgtggctgctgtttaccatcagcttgcggatgtgtaccattcgtccgagtcggagaacgaggtagattcggatgtagtgccatcgaccagcacagggccaactacttcagcagctgcagcagcagctaggcaaagagtatcctcagccaggcgatccactcgaattcactcggaaggagactggcgtgccgattgtcgtcagctgcttgatcttatgtgggcgaggacagattcggcgccgttccgcgagcccgttgacaccatcgacttccctgactacctggagatcatagctactccaatggatctgcgcactgtaaaggaggatctgctgggcggcaactacgatgatccgttggactttgccaaggatgtgcggctgatcttccaaaactccaagaactacaacaccaacaagcgctcacggatttatgccatgaccttgcgactcagtgcgctatttgagtcgcatatcaagacagtggtcaccagctggaaggcggcattaaggcgcgctaataaaaacaagtccggcagcagtggaggaggacgcggtggttccagcagcagtcccaacaagcgagtcaaaaaggagcgatccacgcgccgtaatcaaaagccaacagcagcggccagaagattgccagtcgccaactccagtgaagatgaggacgaggaggatgatgatgatgacgacgatgatgatgatgaggaagaggcatcaacgagggggcgctctcgtcggcgaaacggtgtggccgtaagtgctagttcctctggctccaatcgcgtgacttcttcatccgccgcccaacagcgtcgaggcaaaagcagcagtagcgaggaggaagaggaggaggaaaccagtgcgcaggccacgtcggatgccagcagcgatgaagaggaaagagcccaatccaatgacagttcgccccagcagacacgcacgcgcagggcaaggcagcggcaacggctgagcgatgactccaatatcaacgattccgaggatagttacaaccccaacgagggacgcggcagtcggcgacgtccaggtgccgcacgcccgtccagcaataggcagacaaatggccactccagcaagaggcgacgtttgaacaaaagtccagccaatgctgcacctggccctagtttgccacgtcggacacgtcgcatagcaggcagctccgcagaagaggctgcatctcactcacaacacgatgagagcacacaggatagccagataggacgtcgaaagggacgctcggcaagcagcaggtcaattggcaatggaccaagtaccagtgccgcagctgccgccaactccagccttgaaagtccgtcacggaatactcgagccaacggaaccaggacctcttcgcatcttggagccgaaaatgatcacagttaccacctgccagtgcgcaacgggcgcattatcgagtccgatacggactctcctgtcatcagacccacgcgacagagcgccaagagggcgctaatggactggggtcgtggaagcgatattgaagaggaggaggaggaagaggaagaagacagcgaggaagccgaggagatactgccaacacctacaaaggacgacttgccctctaccagccgagccgctttggctcaggcggctgctggtccttctcgccagctacgcacgaaccgcaacaccgtcgttcgtccagcccagagtgacgacgatgacgacgacgacagtgacaacgagccgctggccaacaatcaacaaaaaaattatcaatcacctgcaaaatctagctcaaccgcaacagtggcccctcatccactgagcctgcgccgtcgattagcctcgccgccagaacggaatacccatatgacccgttcccatgccacctccacaacgtcctcggccgcagcatcacgggcagaacaacaaccagcggtttccacccacgatcacaactacctaggcaacgtgaattcatcgagggcaccgcgccgcattctttcacgccaccaacgaaatgccgacgagttggataccagtctagatgtcctggaaaactcgcgtctgctctcagccatagccaatcaccggcgacccacctctaccacgaacagcaacagtgcgagcaacgtggttacaaggcgtctgcgtggtcgcgctagccaggcgaattcgcacgacgaggatcatgaggaagaggaggctgctgcttccgatgagggcactgatggaggctctagctcgcagagctacgaagatgaggatgaagactccgactcggaagacaatcagccgctgaccagctacgtatcgcccagcaatggtcgtccgaggcgaaaggcaaaaacctcctcctcctccgcaacaactcaggagcgtccgctgcgacgcacacgtcgcccgccatccaataactccatcgcgaacgacaacgatgacgatgatgactatgttgtgccgcggagtcgtcgcgccaaccggggtggaaaccagcgagccgggcgcaaccaaaagagaccgcgctacaatgagcagtccgaggaggaagaggcggcggctggatattcccatcggagtaaacgaatccgtaacggcgacgctcatgccagctctcaggagcgatcacaggcctccaccgagcgggaccaggaggaagaagaggacggtacttcggtggactcggaagaacagcaggtgaacgttagcagcagaggcagggtgcgcaagccgtctgccaaggcgcgcggtatcttcaaggagtgaccgcagactgttttatgtataaattaaatctaattgctaaatcaacaaacctttgtaacatttgctagagtcttatttcttattattgattaatatgtaagagtaaatcacgtcacttctcattgtaatgtcagtgtcaccgctacggtcattgtcccacacccaacccaccccgatccgtcaaatccgtaaccccaaccgtgaagtgttagcccatatccatcatacaccgtggcagaatatgttcaattaatgttcaagtcttaagttgaatattggcatcagtcctacattctatgtgtagggggcatggccaaagcaacgttttatatgtatttctataatatataggtactatcatacatatatatttaaaggtagcactcggaatcacacttcatttaaaatagttttagaataaagtatcatgaaaaaca

SEQ ID NO: 201 - DNA, 7232 bp, Drosophila melanogaster; identical to SEQ ID NO: 200

SEQ ID NO: 202 - DNA, 3420 bp, Drosophila melanogaster
attttaactgtcatccaaaaatttcttgtaatgagggagcgatatgcagtcgaaacagagaagcaagataatgtggaacccaccccggaagatgataacagcaattatatcgttgaaaaagtagcggtgttcgtatcatggattttagtgttgattttacttccattttcgctgtgttgttgtctgactatagcctacgaattccatcgacttgtgatatttcgattgggtcgtattaggagttgcttaggaccaggtttagtttttcttcttccctgcatcgattcgtttaatacggtggacattcgcaccgatgtggttaatgtggatccgcaggagatgctcaccaaggattcggtgtcgattacagtgaacgcagtggtgttctactgcatctacgatcccatcaactcgatcatcaaggtggacgatgccagggatgccaccgaaaggatctcacaggtcaccctgcgaaacattgttggttcgaaaggactccacgaacttctggcatccaggcagcaactttccctggaaatccagcaggcagttgcaaagatcacagaacgttggggcgtgcgagtggaacgagtggacttgatggagatatccttgccaagtagtctggagcgatcattggccagcgaagcggaggcgacaagggaggccagggccaagatcattttggcagaaggagaggctaaagcctcgaaggctttaaaagaatgctcagatgttatgtcggaaaaccaaattaccctacaactaaggcatctgcagattctctgttccatggcatcggaacgtcgggttaatgtacttttccccatacccttggaaattatggcaccttttatggatggaaaggattcgtcggatgcagcacaagatgatgatgaccggagggatagcgatgacgattacgattatttacatttattttcaccaaaagtttacatctcgggtacaccacctgatttctttaatgatgcccaaacagatagcacaactgaaaaacccgaagttggaaaaaccactgagagtgtggaagaaaacaaaccggcgcgttcgtggctatggccaccatttttcagaccctcgcgatctgcccaggatggtgaacaaccaactagcagtcgaagagttcgcccgcaaagtggtcagccgtcgcctagatccaatcgaaccgatgatgcaatcgaaccctatccacttctgaccaagcccccagcacgttcgagttctcctactaagccttcatccattcccattcctccgcgtcctgatcatccctcactgcccccggtgccgcctcacccgacacttcctccaattcctccacacccaactctaccacccattccggaacggcccataccgcctccaaagtccacatcgactccgccagaaaaggatccaaaagtatcaaaggccgacaaaaattattacttttaagatatcgatttaacaatttaacttttgtatgaaaatgactaaaatatctttcgagcaaagaatctttagcggggcttatcaaaaaatttcacataaataacgcgtcatgaatttaatttcattgtgagccctatcaatttaaaatttccttaatacatcaaatacaatgtcagtccttaatcaagtttgcggtggagctgagccgaaatggaaggcagaagagatcatatccaagctaccggaacataaactgatcacctcccaggaatgcatgcaactgaagcgtgagctggaagccgagaggccagatgagtttgaggttagtccgatgatcctgtgccttatgctgaccttgttgcttttcctgatcggcttctggatttggttaatatcgcgtagctgcctcttttcgcaaagcgagccggttgcgtttaagagcagggaagtacgtcgctttccaggaggttcaactccaaaatgcaaaagccaaaaagttagttactttgatgaactggctgactgggatggtaatccattgaagtacaccggttccaatcaaggtattcctaaggcgaacttctgtcatttaatgagtttaaggggaaagtcggctgtttccatatctccagtcttagaaacggagggcgaatcaacacaaagagccaccgaatctgtaccaaaaactgatagcaaggaaacgattctatctaccagtcaggctttggcaggatcacccttctgtagtccaaaaaggaaatacagaatcaagtggtccaacttgattaggcgcaatcgaaaaaaacaatcagaaactgaaagcccacaatgattagttgttggaaattaattaaattactaatttaatttacagaaattccttctcttttcgagtgaaataaagcaagctagggaaaaatgaaatgtaaagattaaaatatatgtactttcccaatatatattcacctgagtaataagaatgaatccggcgtgcagactgaacctggagagcaaggaatgccaggagtggatgaacgaggtgtgtgcccactgcgcccacctgctgcccggcgtggaggaggcggagctctgggacaaatggtggtcggacgagctgcccgctccgttcaagtcgcgagttaatcttatgtccgcctacgattgccacaagctgcgcaaagaggttgcccgccaggtgacgaatagccgagatcaggagtggcacgaggacgaaggcaatccggtcacctggacgctctgccaactgatcctattgatcatagtgatggtttcctcgataatcgccatggtgtgtgccctgaaagtgatctgcgaaagccaacgtcgctggtcgggccgcacgaaatgtgctcccccaataaaggtgaaacaggaagagaagccaccgccacctccagccgatgtggagacgccgccccaaaaggactcctgcaagccagccaagcagcccaaggccttcatctcctttggccggaccaccgacccacgcacacgtttcggtccgtacaagcaccagaagctactccagaccgcctccatgctgccggaatgccagccggcggagtcgtagctcccgccaactcgtgaccatcgccatcacccggagcggtggagcagcacgtcgaatggcaattggcgaaaaacaaatcggccacaaaataaccggctagggggagcactggccaaaaaaatcgaaaacaaattcgaaggctgccggagctgtgctcaatcgcggataagatttatgaaatgtgttccgccccgatttgttcactttttcccggttcgcctctagtccttttcggtttccttttttatgttgccgcgctgcacgaaacacaaaaacaaataaatattcagacgttcgcacagtggccctaaacatggtataaaagtttataaatattttaatatgattccatattaaattattattttaagatgtct

SEQ ID NO: 203 - DNA, 2668 bp, Drosophila melanogaster
atggtattttccaacgttcgcgcatacggtcactcactttttcatttcgtaaaaatcagcaatcgaattaagtgcttaattatttgcattatttttagagctttccgaaagctgccaacgtaaagtccgcgaagcgccttcactggccgaatcggaaatagcaaaatcgaagcaccagagatcgaaagacagcgcattcgattcgatttcacaataactgcgaaccgagggcggagtgggagtgtctgccagcgcggagaaaagtgaacgcattgcaattaaacatgaaatttgctgcaacgtcgacgggagtacgacatttttgtattatcaacgccaagcagcagagccatcagaatcagcagactatatataagatacggccgcaaaaatcgcgatcggagttgaacaattgcaaacggcaaagacagtcgtgtagaattgccaaaaattggaagcaccaaagtttttgcataggtgcgtcctgatcggcaacgtttcgggttagaaagacaaagattaaaaaattgacagctcggctcaagaacgcaatttaatttcctaacctagagcatcaaaatcaataaatcggaaccaacacgtgcgtttcagtagttgccgccaaagcaacgaaagtgtagacattttcgccgttgtgtagacttcgacgcctgttctccaccttttgaggacccagaacaggaaaaggacactcggctacaaagcatctgttttttttgtgtttcgtaccttgtgtttgaaacagtaggctaaacaatagaaaccaaaacgtcgtcgtcgagttcaaacagcaaaatacctgaacgacgcaaaaacaacagcaacatgccgcgacgcaacaagaaatcagcagcaggcagaggccgcaccaatgactccaattctgaggacgagtcctttgacaatgtgagcgtttactctcatatgtccgaagtcgcatcctcggaggccaccgacgagctggccaatgagcgtttcgaggagaagttcgagaaggccctggaacaggccaccgagaagtcggcccagacacgtgtgcaggctctgcaagcgatttgcgaactgctcatgcaccgctacatgccggacttcgtggaggaccgcaagatgaccctgatggatttcgtggagaagagcatccgtcgaggcaagggccaggagcaggtgtggggcgcacgactcgcgcccctgctggtgctccaaatgggcggggatgaaggcatatccaaggcgatgaatcaattcctgttgaacaccgttcaggacaagtccgtgggcttcgatgcccgtgccaagtgctgcacagctgtgggattgttgagcttcctgggctgcgaggatgttggggagttggtacacctgatgcagagcttcgaggccatcttcgcaggcagttatttgcgtggcgatgacaagacaccggtatccgtcaccgccgaagctgggactttccatgcggaggccttgaacgcctgggggcttctactaacacttataccttcgggggattttgtttcgttgatgaccactggccaaaacatgtttccatctattaagaagttcttgggtctcttgcaatctacacatttggacgtccgcatggccgctggcgagaccattgctttaattctggagtcgggacgtgctcacgaagaggatttcctagaagatgacatcgctgagttatcggaggccgtcaagcagctggccacggattcgcataagtaccgcgccaagcgcgatcgcaaggcccagcgtgccaccttccgtgatgtgctgcgatacctggaggaggacatttccccagagattagcattcgtttcggtaccgagtcgctgacactagattcctggtccatccatcatcagtattcggccatgtgcactgtcatgggtcccgggatgacctcgcagctgcaggagaacgagttcatccgtgacatcttccagctgggaccacgacccacgaacacaggcatcaatggaaacgccaaggtcaagccgaccaagctggagcggcaccttgtgaatgctgctgcattcaaggcacgctccataacacgtggaaagaatcgtgacaagcgatcggccgtcgtcacttaaacctgtgcttcacccaccaaccgttcccatccacagacacccaaaccaaccatctcaaaccccgttagccaactctggacttactagttgaattgtttctaattttagcttgaaccaggcaaagcgtcgccaaagctgaagaactaagtctaaatttaggataattcagtgtaatctacaaaatttctctagtttattaaccacatgttggagccattgtttgaatattatgaaatatttattgcgtgcacgcacagtggttgtttatcagtaagtgcatggctggctccagcttggatcttattctttgtgaatttaaattaacactgcgattgttacgactggcatttacgctttgcgatttgggttaacctcttttgttgttgatctttttaaattacaagcgtaggaaaacatagtctgctttaatgctgcgaaaaagttattcataacttgacatggcttttaatacgcataataagcggctctatgaatacatatattttgtagtaaataagtgtaaaataaagtttaggcttaaacg

SEQ ID NO: 204 - DNA, 2806 bp, Drosophila melanogaster
agttccttgcgcgctttcaactgcaaaggttgccccaaaaaggcacctaaccgtatacaactggcagatgcccaaaacttcaacattgtccgaaattcgtcgaaagtcataaaaacttaacaaatcccccagtttagcacaaagggtcgtttaacttttaacgacgcgacggggtaattttattgccagagtcgtggcccgataacagtgataacaaagtagccgcgttaaccaaaaaagtttcacactttccgtgctcgaaatcaaaagacgtaatcgtaaaacgcggccaagtgttgcgatttatgagttcacaatcgtaattgaattttatgcgaaaactttggccagttttcctttggattattgtggcaataagacgaaaacgcaaataaaggtcgtgaacataacgaaaattgccgccaaaaattgatactaagctcatgaacggactcaacttgcatctgtgaaagtctgtgaaagccgactggaggaaagcccaatgaaaagtttggttgccccccaaccaattcattccgagtggagcaacagcaacggcaagagcaagtgaacccctgcggcttgccaaccacccacacgccacccattcgccacccactctagtcaaatttaataaaaggccgctgcgagcttcgtcctggtggtgactggaactcgctgctgatgtcctgaattgtcctggcgggctcacgcagtgcgacaaaagccgcccgcagcgctttttatatgcgcacataattcagagcgtcggccagtaacacccgctgccaaaagttaatgcccaaaagcgaggccgccacaatgataaccaacaataatttggattatgaccaggccagcgccagcagcacaataatagcaggagctacatcgacgaccgcgggcacagcggcaacatcggtggccatgagcaacagaaatggcagcaccagcagcagcagcaactcctcgcccacggcggacaattccaattccaattccaactcgaattcaaacgcaaatataaatcggaatttgaatcagaaccccaactcgaactccaatacaaactccaattcgtatttcaaccgattcgacaatcgcatagctgccaacttggctgccgttttaactggcgcaggagcccgttttcgatcctcctcctgcagcaatcgccatccagctggagttgcaaatccggccgttttgagatcaccactcgccacaataagccgcaagactagtctggccacgcccccttcaccagcgagtctaggacgacgccgcccactgcaactcttcacgcacgcgaatctcaattgcaatgacaacgagaaggtggcccaaacaccaagctccgatgaggataattcgcccaccgaactaaacagctgcaagcgattggcagacaaacctcctctggtcaaacgcttgacaatgggcttgctgcgccaaaacgaggagtcacgcccattggtgggcgacatgactcctttgagcgcgccgctggacatccagccggtgtactcgaatggctacatcaacgaggactcctacatcgacagcaagttcggtgactcgtgccgccaatccttgacagccatcccgatgctggacaatgttaacctgaacgacaataacgagttcaacctgaagaagcgctacttaagagaaacgagcagcgcaaattccagtccgaaaatctttgccaatcgcctgcggatgaaccagggtgccgttggccagcgatgcagcagtttggccaacgcattcggtaatgtgggatccgatgaggaggatctcgagctgaaggatgcctgctggtaccaggcgggcatatccagggacatagccgttgaagtcctgcaaagcaagagcccaggtgcgtttctcgtgcggaagagcagctccaaaccaggatgctatgcactgacactgcgcgtaccctcgccacctgggccgaaaatagctaactacataatcctacgttccccaaggggctacaaaatcaagggtttccgcaaggagttctccagcctgaaggccctgatcacccaccattcggtgatgcccgaactgctgcccgtcccactggccatgccacgtcccaccaacatgtcatcttcgcggcggaatctcgacgacttcgatacctacgattcgctgcagatgctgctgaagtatctgcgtgccaagaacatggagacggagcagcagcagtagctaatggaggaaatcgatcaactggtagcacaaaattacatttaagttctggtgcggcaaaatagttttgcttgaatcgaaccgataccaagaaaatgtgatactctatgaaaaagaaaaacacagacactgcaaatgaaacgcctagctgataaatggtgaaagtatctctagtttagtttagtttagttcgggttttggttgtccccatttgttggtttgatgcattgacgacatgtaaccataaaaatggtggaaaagtgcttgaggttatagcaaagtcggggacttttgccaattcaatggttattcgaacacttaagtgacattataaattgtaattttcaagtttgaataatttgaccaaaaaattggtcagtcttgaatgtttggtattcaattttctttcagcactttcaactgcaagcctataaaaataattcaaaaattatataatattccatgtaaggaaaactctatgttaaatgttgttgctgcttcccactgttaagcataaataaatatataccaaattgaaatgcatatttaaatgtaagcaaaacagacacaaaccgaaaatcga

SEQ ID NO: 205 - DNA, 2537 bp, Drosophila melanogaster
ctcgtgttatcgaaagttgtgttgaaatttcagaagtcatattaaatttgtttaaatacgccgatggggaccgttttattatggagaacaaaaatgatataaaagaaatggacctgggcctatctcgagcagatatgttggaacagctcgaaaaaaggcgaatatttctgggcgatggcaaggatatgccgctggatcgtctggaggatatctaccgcaattacatagttcccaagccaaaaagagagcgcaagccgcgcaatccaagtcccgatcccaatttcaatcccattgaaatagagcagctagcggagcgcatcaagtcggttgtcatagtgggacagaaacgagcgcatgcagagaataagagcgacgaccaggccaagcaaatcaagatggacctggactgacctcatgccgtttggcgatagccaataatggctttccaatcacactctcagcttgaccagttagcaaacacaagcggccagcaagatgatccagctgctccagttgcttctatgtactattccactcgttgtgggcgaggttctgcccctgcaactcgatttggacaacagtcaaattaccatacggcgaagtgccagtcgcgatgacaaattgcaggtattccacagcatctggggcgccattcgctccgacttcgccaccgatacggacaaggtgaagggcctgtacagtcagctgggcggatatattcgcgacgatgtgcagtgcagtagcggctccacgggtcgatctgcctgcgagctgcagcaggaggtgcgacgccacctgcggaccctcatggcccagcggctggccaatctgttgaacgccgaggagagcattcagacatacggtatgtacatagcggccagtgtggagcccgccctggtcagggacattctggtgcacgccatcgaggacgtgtacttccatcgaccgctggagaagctggtgcagcagctggagcaactgtacgcggatcgcgacgaggtcagctttcgcacgatgatcgaggcgcaattggcgctcttctggcgctatcaggccatgcaggacagcagcgaggcgtacctgttcaacgtcgcgcacatggtcagcaagatccggagccatcacatgtacgccagcgtcgatgcggatctccagaagcgagtggaggcactgagccaacgtctgccgcccgttctagacttgctcttcgatccgcagggattctgcctgctgagtcgctccgatcgcgagtacatctacacgaccataacggacgagtggaactacggtctgaatgggcggcagatgttctcctggcgcgagaagaacttcaccgataccgcgggcctgacacgcgccttcgtccaggagcagcactccacgccgctcttcacgctgcgtagcgagctcttcaagtggtactacttcgtcgatcccagccagggcaatcgcttggccgccctgcgctccggcagtcccagctcctcgaccagcacctggaccatcgcctacgcgggcgacgcactcatcttccggcagcgcgaactcacgctctgtgctgccgaaaagttcgacgacgatcgtcgtctggtgaagatgctgcccggccagatgcacacgccgccatcggaggcttgccagtggctaccgatcgcctgtgctccgccaaaatgagcgggatggctgtaccctggaatgtttgcaacaaataaacttatgcattagtgtataagtgtttttattcctagccagtcatgaataattaaatatataatttgtattaatatgtgtgtttccgttcagtctgcaagtgattatacaaatattagaaagggtaaccaaacaaacaaattttacagaacggtacagcatagaacgtggtggtcaatggtttcaattaagcctaatcagtggttccccttgtggttgagctgttcgtccgttattgtactacttgccgaaggtccacctcctgctcgaagaactcctcctcctcgctgtcatcggactccgactccggctccggctccgagttgcgggcggcctgttgatagcggaactgcgagttgggcagcggcagtaactccgctggtttatcctcctcaggttcctccactgattcctcctcgggcgccgcatccatggactcctcgatggtgcgcgagtggtcctcgatctcttcgtcgtccagatgcggtgctccattggcgaacgaggcgaagcgcaaaggatcacgcagtttgcccatcaccgcccactgcttgcactccggactgttgacgtacttgcgcaggtccgccagcgatttcgaggtctccacggccgtctgctgttcgtactcctcctgggtgagcatgcgcctctttagcggaaaacggcggcgatacatgaacttgatctggttcgtccacgaaatggggaagtagtgggccacaaagaccagcaccatgatgaagatcacggcgctggtgtgccagctgctgaagtaagccataacggcgccaatggcctgcagcacccacatgacgatggtttgc

SEQ ID NO: 206 - DNA, 1866 bp, Drosophila melanogaster
gtgattttatcgggcatctctgaacatcaggtgttattaacaagcaaagtttttattggaattcgtcgtttatgatatgatgccgaatcatggacacaccggagatccacgtaaatataagctcgcagacttgccgcgtctgcctggagacgcacgagaccaatctgtatgtccacgatgaaatcaaatacaacgaccttaagttggagctctggcagttgttggaggcagtttccaaattgaagtggacatggacggacccaaatctgcctatgcatctgtgtcaaaattgcgcccgccggctgatcggcgcctatgagttcatcgtcgaagtggaaaacgcccatgaaactttacagaatctcttcgagcaacaggaagttgctgccaagccggatgaagttcatgtggatgtcgtggagcttatagaccaagacgatgtggtcagtatggcacaatacctgtccacgtcttttgccgaacagcacgtggaaatggaggagaagtatggagaccaagactgttcagcttttacttcagatgtgggcgaagagccactctatgcgagcgaggatcgtgatgatgagcctgaagactcctttcagctgaagcctcggccagatgaaatagaaaacagagaattgtcgcgaccttcccagctgggcagtcgtttgaaccattcggcgaacttcatctacaagtgcgccgtctgtccgcgtgtctttgccaaaagtgaatctctgactcgtcatttttcccaagcccacaaactgacagcggacgtggccgccatgaagctggccaacgagagctgcggcaccggtctgctaacctgtgagcactgtccgcggacattcaagcgtcaggacacactccggcgacacatgcaggcattccatcccgacgcaatcgcattggaacccgaagaaacgacggacaattccgcccgaaaacgcatagctaagcggcgagactgtccgcactgtggcctgagctttcccgtatctagccttaccatccacattcggcgacatacgggcgataatccgtacaagtgcgatcaatgcgagaaggcctttccgcgcagccaagatcttagtcttcacatgcgtcagcacaccggcgagcgtcccagtgagtgcaagatctgctccaagaagtttatttcgcagaacaagctggcgcgacacatgcgattgcacacgggtcaaaggccgtactcctgcaaaatgtgcagcaagagctttgtgcagtccaacgaccttaagatccatatgcggcgccacacgggcgagcgaccatatcagtgtggagtgtgcggcgagagctttgtgtgcggttcgcacctgaatatccatcgtaaccgaaagggacatctgattgctgtgattccgggcaatgaagtagaggcaaattttgctgctgatccttatgtaaatgctagggtcaaccagcgccgttcggaggatatagagcgtatgcgcctgcaacgcattcccgaaaaccaattgcaacagagactggaaaatctccccaaaccggatgtcccggctatgtgctacaaatgcggtgtctgcgaacagaaattcaaaagtggagctctcctgaccgtccatcgcaataaaatgagccattatgagatcgaaagggtctacgaaaatccgttcggaaaaaatcagaaaatcatcaaagccgaatataattaaaatgtattactagctaaagaaatcatcactaatatagaatgtagaatgaacccatgtatattagatactaattgtatcgtaagactttcaaaagtctacaaaacattaaatgacaagttgactttaaatttcaaataaataatttattttttctataagc

SEQ ID NO: 207 - DNA, 1329 bp, Drosophila melanogaster
atcagttgcgaaacatgaagtgcctagtgttgattgccttcagtggcctcttcttggccagtgcccaggcccgaatccttcccgcggaggatctcccctgggagttgccagaagttccggtagcggtcaacgagattgaacccagagcagctggttgttcaattaagatccgcagctctgagctgaaggatccccagcctctgctgattaaatcggacacctctgaaatcgttggattctcggacaccggctatgtggacgtggacaaggacaagaccatcgaattccactgcaccagcagcctggcttcccctctgtctggaaaatccgtgaccgccaagtgcgtgggtggcaccaccttcaagattgacgataaggagcacgatctgtccgccatcaagtgcacatcgtggccagtttttgtgggcaagaagtccggatccagctgcaatggtggcaccacgctgatcaaggtgggctttgagctctccggctcacgattcgcaacgcagtacgaggtatgcttcaacgaggacgaggaggtgaccaggtacgtctatcatcgcctggaaccgggaaacaactactatgccaccggagtggatcgcattacatttggagccggcggctatttcgcgggtaagaatgtggacaagctatacacgcaggctgttcagaaggagaccatcgacaaggagctggacatggattcatcccgtttctttgactcggccaagaacatcttcctggcccgtggtcacatgggtgccaaggctgacttcgtatttgccccggagcagagggccaccttcctgttcatcaacgctgctcctcagtggcagaccttcaatgctggtaactgggctcgcgtggaggacggagttcgtgcctgggtggccaaggagaacaagcacgtggagtgctggacgggagtctggggtgttaccacgctgcccaacaagaatggggaacagaggcaactctatttgtcccacgataacaacggcaacggtctgattccagttcccaagctatacttccgagtggtaatcgaaccatccaccaagaagggcatcgttctgatcggcgtcaacaatccccatttgagtttggaggagatcaagcgggactacatcctgtgcacggacgtcagcgacaggatcaactggatcagctggaagaagacggacatcaccgccggttactcctacgcctgcgaggttccggagttccgcaagaaggtgacgcatctgcccgagttctccgtcagcggactgttggtctaaactggttatgtttgaaataataaataatacctttacatcgaaa

SEQ ID NO: 208 - DNA, 2412 bp, Drosophila melanogaster
gaaattgcgcagcaaccccatctggccacactgacccattagttttttgtttatgttgggttgtcggaaaaatcggctgttttccgtgtgtccgtctgccatgaaaagctgctaaaaagctaaatataaaaatcagcgcagcacacacgttccgctgcctgcattgtttgcccattctaatgggaaattatgtgagtgcgagtcaggaaaacgcatcgtgtgtgtatatatacatatatacataagtatgtaactgcgcccgtttgtttgtgtgtgtttttgtgtgcatggtgcaatggaaaagtgattattataaatgaaaatcagtgaaatgttcaaccaactcccacttgtgcgtgtgtaggaaggcagaagggtgttttgcattcgtgtgcgtgccagataaaaagactttgaatttctggaggatattagtgtcaactgtgtggggtataatacgccgtaggccctaatatgcaggcaagtccattaattacgccaaaggtcacaggttaggcacgcagccaggatccaaggagcaataataatgttgtatgaaggcgacctgtaagcgagagcgagagagctggtgttttggtgtgagtgcgtggtagaacaaagaggacgaaaaacacggctaacgaattcgccgcacgacacactcgccgcatggcgaattcaaacgtatcccagtgaacgaatgagaaacaaaaggatatcttattgaaactgattaaactaaagactgccgaatagttatataaaatccaaaaccatgtctgcggccgaactcgaggcggaggcttcagcccaggagcaacaatcccagcaacaacaacaaaatcaatcacaaagcgaggagataaatacaaacactgccatcaatgcaaatgcaaccacaacaaatagctacaacaataatttagatacggaaacccagcttcagatgcaccaggatccgcagcagcagcaggaactcgagggcaatagcaacaatggcatcacaggactcggcctcagtctgatgaactcctcaccgccgccgcacagctaccgacattcgcgggcctatcgccacttcaagaatccgccacagccccacatgtgcatccgcaccaccacggaggcgggcgaggagctcttcatcaatgtcctcagctggacgcgcattgtgataccgcaggagcccagcgatcccattcccctttacggaggcatgcgggtaccgcctggcagcccacgcagtcctcccattgtctttgccgtaatggccaatccggaggtgctcaaagactccggacgtcacagcaaagatcctgaggagcgacgagctatggtggagctgatgtgcgactttgtggaggctatgaatccaggcgtgaaattagtcagaaacgccgtaatactcaaggatcgcgatatctccggcgagctgaaggatgtctggaatgccgttcaggcgcagcgcgatcgcgagagggaggagcagatgatgcagcagcgccagcagcagcactaccagaacatcaccacgcaacagatgtttcccaaatcgccggatgcatcgcgggcagctagtgctggtgctgcagtgaacgaggccagctcgccgccggctcacttgtctgagccgctgctggtagagcagggaaatggcaatggcaatggcatcaccctggccgtgtttgcccagcagctggacaacaaagtggccagcgagcagggtgagcagcaggagcaatcgccagtttcggaggatgcttgcgtggatcaaacggatgcaggcagctcgctgaatggatcaacaactgtgctggacaatcagccggtggcagtggagaacgaaccagaagtaaaggttgcaccaccggcagccacaaatggtgctagcactcccacacccagccacgcaacacccacagtaacagccacagccacatcatcgcccagtccaactccaactcccgttgttgctcccgtcgttacagcaactcctccacctgctgctcccgcaaagaaggagaaactgggcggcttcctgcccaacggctgcatcttcccgcgcttcaagaacaacaagcacaaggacaaggacaatagtcacaaggagggcaagagcaaagagaagaccctgctgaatgcgctgaaaaagagcaaagagaagaaggtggcgcccagtgaacagccgacagaaaaagccgccgcctcggacaacggaacaacgcagtacgagaagaactgcatcaacaatctggagtgcgaggtgcagaagctggacttgaacagcggcaccaatggcgacaatagcatgttcatcaagctgaaagtttcgccggccaatgccacagcagcggcagcggcggccaagtagagataatcctgaatttacacacaaaaaaaaaataaataaaa

SEQ ID NO: 209 - DNA, 5486 bp, Drosophila melanogaster
attgtgattcaatatttcatatatttgagagttaattttatcatccaaccaatataatgattaaaaaagtaatttaattatttgttttttaattaaaaaagcagcgtgaacgattttaatataattatatattatatattcgctgttgatccctttcaaataaaaacatcgcagaaaattttttgtgatatttctaaatatttttatattctattattttgttaataagtaaaatagttcctgagttttaggtttgttcataattgacacagatgcaggacgttcggaatatcaacctggtcaacaattccagcaacagccatgattcgtctctggcaaactccaaaatgccgcgcaactttaaactgctatctgatccacagttggttaaatgtggtaccagactctatcgttacgatggtttaatgccaggagacccgtcctatccaacaataacacctagagatcctcggaatccacttattcgcatacgcgccagggctgttgaaccacttatgcttcttattccgaggtttgtcatcgatagcgactacgtgggccagccacctgcagtcgaagttacaatagtgaacctaaatgataacatcgacaagcaatttcttgctagcatgctggacaaatgtggaacatctgatgaaataaatatttaccatcatcccatcacaaacaaacacttgggcattgcacgtatagtgtttgatagtacaaagggagcgagacaattcgttgaaaaatacaatcaaaagtctgtaatgggaaagatcttagatgtgttttgcgatccttttggtgccacattaaaaaaatctcttgagagccttacaaattcagtcgctggaaaacaattaataggtccaaaagtaacaccgcaatggacatttcagcaggcggctttggaggacaccgaattcatccacggatatcctgaaaagaacggcgaacacataaaggatatctacaccacacaaaccaatcatgaaattccaaaccgcagtagggatcgaaactggaatcgcgacaaggaaagagaaagagatcgccattttaaggagcgcagtcgacactcgtcagagcgaagttatgaccgtgatcgtggaatgcgagaaaacgttggaacttcaataaggcgtcgccgtactttttatcgacgccgttctagtgatatatcgccggaagattctcgggatatattgatcatgacaagagaaagatctagagattcagattcacgtcctcgtgattattgtcgttctagggagcgagagtcgtttcgagaccgtaaaagatctcatgaaaaaggccgagaccagcccagagaaaaaagagaacattattataactcatctaaagatcgagagtaccgcgggagagatcgcgaccgatctgctgaaatcgatcaaagggatcgcggaagtcttaagtattgtagccgctattcattgcatgaatatatagaaactgatgttagacgttcttcgaatacaataagtagttactattccgcttccagtcttcctattgcaagccatggcttcaatagctgttcttttccttcaattgaaaatattaagacatggtctgatcgaagagcttggactgcgtttcagcctgactttcatccagtacaaccacccccgccgccaccagaagagattgacaactgggatgaagaggaacacgacaaaaatagtattgtgcctacccattatggttgcatggcaaaacttcaaccgccagtgccgtcaaacgtgaatttcgcgactaaattacagtcagttacacaaccgaattccgatccagggaccgtagatttagatactcgaatagcattaatatttaaaggaaaaacttttggaaatgcaccgccttttcttcaaatggatagcagcgattcagaaacagatcaaggcaaacctgaagttttttcggatgttaattccgattcaaacaactcagagaacaaaaaaaggtcatgtgaaaaaaataataaagttctccatcagccaaatgaagcaagtgatatatcaagtgatgaagaactaataggtaaaaaggacaagtcaaaactcagtttaatttgtgaaaaggaagtaaatgatgacaatatgtctttatcgagcctatcttcccaggaggatcctatccagaccaaggaaggtgcagagtataagagtattatgtcatcttatatgtattcccattcaaatcaaaatcctttttattaccatgcttcaggctatgggcactatctttccggtattccgtctgaatctgcaagtcgattattttcaaatggcgcttacgtgcattctgaatatttaaaagctgttgcatcatttaattttgattcgttttctaagccatacgactacaataaaggtgctctatcagatcagaatgatggaatacgccaaaaagtaaaacaagtaattggctatattgtcgaggagctaaaacagattttaaaaagagacgttaataagcgcatgattgagataactgcatttaaacattttgagacgtggtgggacgagcatacatcaaaagctcgttcaaagccactattcgaaaaagcagactccactgtcaatacaccattaaattgtattaaagatacttcttataacgaaaagaatcctgacataaatcttcttatcaatgcccatagggaagtcgcagattttcaatcttactccagtataggcttacgggcagcaatgcccaagctgccatcgtttcggcgtataagaaaacatcctagccctataccaaccaaaagaaattttttggaaagagatttaagtgaccaagaggaaatggtgcaacgctccgactctgataaggaggattctaatgtggaaatctccgatactgcacgttctaaaattaaaggtccagttccaattcaagagtcagacagtaaatcgcatacatctggtcttaattcaaaaagaaagggaagtgcttcaagttttttttcatcttcgtcttcttccacttctagtgaagctgagtatgaagccattgattgtgtagaaaaggctaggactagtgaggaagatagtcctcgaggatatggtcaaagaaatctgaatcaacgaacaacaactattagaaacagaaatctagtgggtacaatggatgttataaatgtgagaaatttatgttcgggctcaaatgaattcaaaaaagagaacgtaacaaagcgcacaaaaaagaatatttattccgatacagatgaagataatgatagaacgttgtttcccgctttaaaagaaaaaaatatttcaacaattttatctgatctcgaagaaataagtaaagatagttgcattggattggatgaaaacgggattgaacccacaatattaagaaagattccaaacacgccaaaactgaatgaagagtgtaggcgctctcttacccccgttccacctccgggttacaatgaggaagaaattaaaaagaaggtggattgtaaacaaaagccgtcatttgaatacgatagaatttacagcgactccgaggaggagaaagaatatcaggaaagaaggaaaagaaatactgagtacatggctcaaatggaacgagaatttttagaggaacaagaaaaaaggattgaaaagtcattggataaaaacctacagtcgcctaataacattgtaaaaaacaataactccccaagaaataaaaatgacgaaactagaaaaacagctatttcccaaacaagatcatgttttgaaagtgcaagtaaagttgacactactctagtcaatataataagtgttgaaaacgatataaacgaatttggccctcatgaagagggggatgttcttacaaacggttgtaacaaaatgtatacaaattcaaagggtaaaaccaaaagaactcaatcgccagtgtattctgagggcggttccagccaagcttctcaggcgagtcaggttgcgctagagcattgttattcgttgccgccacactcagtttctttgggcgattatccatctggtaaggtgaatgaaactaaaaacattttaaaacgagaagcagagaacattgcaattgttagccaaatgacgaggacaggtcccggccgacctcgcaaggacccaatatgtattcaaaagaaaaagagagatttggcccccagaatgtcaaatgtaaagtctaaaatgacaccaaacggagatgaatggcccgatttggcacacaaaaatgtacattttgttccgtgtgatatgtataaaactcgtgatcagaatgaagaaatggttattttgtacacttttttaacaaaaggcattgatgccgaagatataaactttataaaaatgagttatttggaccatttgcataaggaaccgtacgctatgtttttaaataatactcactgggtggatcactgcacaactgaccgagctttttggccaccgccatcaaaaaagcgaagaaaagacgacgaactgatccgacataagactggatgtgcgcgaactgaaggattttacaaattagatgttcgagaaaaggctaagcataagtaccattatgctaaagccaatacagaagattcctttaatgaagatcggagcgatgaacctacagcacttacaaatcatcatcacaataaattaatttctaaaatgcaaggaatttcccgcgaagctcgctcaaaccagagaagacttttaacagcctttggttctatgggtgagtctgagcttttaaaatttaatcagctaaagtttcggaagaaacagcttaagtttgcaaaatctgcgatacatgattggggattatttgcaatggagcccatagctgcagacgaaatggttattgaatatgttggtcagatgattcgacctgtagttgctgatctaagagaaacaaagtatgaagcaattgggattgggagttcctatttgtttcgaattgacatggaaactataattgacgcaactaaatgtggaaacttagctcggtttataaatcacagttgcaatccgaattgctacgctaaggttataactattgaatctgaaaagaagatagtaatatattcaaagcaacccattggtatcaacgaggaaataacttacgactataaatttccactagaagacgaaaaaataccttgtctatgcggcgcccaaggatgtcggggtacacttaactaatacttatttacaacaatgaattaaatattttagagcacataaatttaatttgttcataaaatccaaagtggggtacgtgtaagtatatatagttttttttataacttaaaactataattaattattataaaaattatatcaacgaggtcagaggtgctgttcaaaatggtttaggtctaaattaagctaaaatactttacttataaaaacaatatgtatatactaaaacccatttgatctgtaaacacgaacgaaaatgcaataaatacattatcttaaatttaaaaa

SEQ ID NO: 210 - DNA, 561 bp, Drosophila melanogaster
atggcgtggtgcttccgcgacattcggcgccacatgtgcatgctggtgcgtcagaacttcgccaaaagttgcgagaagaagctaaacgatcagatcaacatggagttgaaggcatcccaccagtatctggccatggcctaccatttcgatcgctccgatatcagttcacccggaatgcatcgattcttcctaaaggcgagcgtcgaggagcgggagcacgcggagaagatcatgacgtacatgaacaagcgtggtggtctaatcattttgagcagtgtaccacagccgttgccctgtttcgccagcaccttggatgcactaaagcacgcaatgaaaatggaactggaggtcaataagcatctgctcgatttgcacgccctggctggcaaggaagcggatccgaatctctgcgatttcatcgaggccaatttcctgcaggagcaagtggatggccagaagattctggccgactatattagccaattggagaaggcacaaaaccaggtgggcgaattcctgttcgacaagtatatgggcagcggcatgcatcctgcgaaatga

SEQ ID NO: 211 - DNA, 1843 bp, Drosophila melanogaster
actgcaccatgggggtggtgataaaagggggtgttgtaatgaatttcattgggttccaaggccggacaaacatgactcgttaatcggaaagacctccaatctcttatacattgtttacgccaaatgcactcactattcaattcggtaatctccgcctaaaggggttccactcatcggttatcagctagcagttatcagccagagaagctagctatgaattcccgctccctcgctgataacacggttataagctatctcctctgtgtgtgtgtgtgtgacttgtagacccaccagcttcatttgctcattgatcggcggtcactcgacgcggaaagttccacggaaagaagcagcgaaaatggcaggtgcaacaaatgcggacatcaagcgggttctatccatccagagccatgtggtccacggctatgtgggaaacaaggtggccacctatccactgcagctgctgggtttcgatgtggatccactgaactcggtccagttctccaatcatacgggctacaagacctttaagggtcccgtctccaatgaaaaggaattagccaccattttcgagggtctggaggagaacgagctgctgccattgtactcacacctcttgaccggctacattggaaatccattgttcctacgccaggtgggccacattctcaagaagctgcgtcaggctaatcctggcctggtgtacgtctgtgatccggttatgggtgacaatggtcagctctatgtgcccaaggagctcttgcccgtgtatcgggacgagatcattccactagcggacatcatcactcccaatcaattcgaagtggagctgctcacggaaaaggaggtacgcagcgaggcggctgtttgggaggcaatggagtggttccatcagcgtggcatcaagactgtggtcatttccagcagtgatcttggccagcctggcgttctgcgtgctttccttagccagcagaatggtccccgcctggccattgatattccgaagcagggtggcaaggatttggtcttcactggcaccggcgatctcttcgcctcccttttcctggcccacagtcatggcagcaaggatatagccaatgttttcgagaaaaccatcgccagtttgcaggcggtgatcaagcgaactgtggcttcgctgcccaacggtggaaacggcccagtcaaagcagccgaacgggaactaaagctggtgcagtccaagacggaaattgaacagccccagcaagatccacacgattcgctttttgcccttggggcgagcaacaagtggctatataagattgcagccggccagtcgggaaaaaacaaacccgtagatatgtggctgtcgcttatctttattgcctgtctagccggcgcaagcagtggcgacgagaagatcccggtggagcagggatttgtgccccgctacactccggtggccgagagcaagcgacaggatctggatttacccgctgacgtaggcatcgagcagcaaaagagacctgctgcaggcgataagaaaccctggcgacgagtgcagtacggatacgatggagtgccgactgctgcctgggctgctccatctccaccagctgccatactgtccatcctgaatcctctgcttgcaccgggattgcttcttttgggtgtgaatttgggagccctgctgtacatgctgctgggactcctgggcttggctccttatcgcagtggcagcgccagtcggttagcctcgcatccggaaaccaactcccaattctggccgtgcgatcaaagcttctaccaccgagacgacagacacaatttggatgagggcaaggaaacggctgtatatttttag

SEQ ID NO: 212 - DNA, 765 bp, Drosophila melanogaster
atgagtccggttcagtcatattcacacagtcgactactcctgctcgtggtcatcgtgaccttgggcgtggtccaatccagtcgactgccggcggaggtgggctcccagccacacagcatctcactgcgtcggaatggcgtccatgtgtgcggaggagctttgatccgtgaaaagtggatcctcaccgcagcccattgcgtcagtttgggcggtggacagcagagctacccagctaaatcctacaatgtgcgagtgggcagcattcagcgactgaccggtggtcaactggtgcctctgtccaagatcataatccacacgaactactccagttcggatgcagttggctctaatgacttggccttgctggagctggaaacgtcggtggtcctgaatgcgaatacgaatccgattgatttggccaccgagcgaccggcggcgggctcccagattatcttctccggctggggatccagccaggtggacggatctctcagtcatgtcctccaggtggccaccagacagagcctgagtgcgtccgattgccaaacggagctgtacctgcagcaggaggatctgctctgtttgtccccggtggacgaggacttcgccggactctgttccggtgatgccggagctccggcgtcttacaacaaccaattggtgggcattgccgccttctttgtgagcggatgtggttccgagcagcccgatggctacgtggatgtgacccagcatctggagtggattaacgaaaacgctgtttaa

SEQ ID NO: 213 - DNA, 1555 bp, Drosophila melanogaster
atttagtataccgagaacctttacgatggcgaggttggaagttataagagggctgacctttgccctgctgctgacgcagttgctggcagcccacgtcgcccgggcggaggtcatcgatgcggaggagacggatcgcttctgctacccggagtcctcgaagaactcccggcggtcctgtgagtgcagcaacgtgagtgcttctccctggggaaaccgagccctgcgcatcgactgcagctacaaggactacaaggtggcggatctctccctgctgctgccactgtacatcgactccctggacctgtcctggaacgccctggactcagtaccgatcttcactagcgacagtctgcaccagctgaacctgaggcacaacaacatttcgcagttggtgtccggaaacttcaagcaactgaccagtttgagggagctgtatctgggctggaacagcattggcaaactagagtccggatcttttgacggattgccacatctgcaggtccttgacctagcccacaacaatctgcacttgctgcccggtcatctttttgccccgcttttggtcctgggcaccttggacatctcttggaatcgacgcttcaacgagtctggcggggatctatacaccggactcggggtgaactggaaactctccaccttaagactggacgcttgtagcctaaatgatcttcacctgcccgtaaatgcacctctgaaagagctttccctccgtcgaaaccagttgaagcggattcccacacagctgccggagactttactccgcctagacattagcgacaatctgctggaggagctgctgccggaggacacggctaatctcacccaggtgcgccaactttttatcgaggacatgccggtgctccagagggtggtggccaattccctgacccacgtagatgtcctcgagacattgagcttccagaacagccgtcagcttagccacttggacgcggaggcctttggacccatcatgaccacccccaccaaaaaaagagctctgcggtcgctgagctttcgcggcactatgctgcgcacctttaattccacgctggcgccgatttttactcagcttgccgaactggatctcaacggtctgccgctgcagtgtgactgcgagctcgtctggctgaagcagctgccggtccaaaccaacgggcgctgctacaagccggcccgcatccgtggcatgctggtcacctcagcccgcggcgacgccttcagctgcgacacctggccgagatgggcctacggcctggtggtgctctcactgatcgccctcagcgccgcggggatctacctgatcgtcatgggactgagaccccatcggggagtcaccatgcggcgcaaggtcggtgccggcagtccctacgcccgcgtcaccatcgagcccaatcgccaggagaatccccactaggtgtcgcccagtacctagtaccgtctaagttcttgtagtcaatcttgtaaaatcgccaaacagaaaatgtaaagcattttaatctagtggaagttacatttgaaatatatttaagaaagt

SEQ ID NO: 214 - DNA, 2693 bp, Drosophila melanogaster
agtgtattggttaatgtgcgtgtggtgtcagtgtatgtggttctttaagtaaaaaaaatatatcggagtttataaaaacttttaagcaacaaactctgcctgccttgtgtttttatatcatttattttaaaaaggggcaaaaagtgcagcaaatgtcaggcgtggatcagatgaaaataccaggaaacacagctaaatcggtcgaggagcgcaacataccatggagtcagcaagtcgatgaggcctcgtacgaaaatctatcctctcccactcacgatgaagtctctggcaatgacaactccatgcaattccaatatccgccgttcaacttcaaggagaattgcaacactccatggaacaatatgaacaagggccgaaaggcgaacgccaaccatgattcatatagaagacatggtcatagtattcccaataacacacgacgcgacgagcaccaagtaaatccttggaattccaggaagccagcagcacagtcgtttcgaaatgaaaacgatcagccgtctacaaaactggacaacagaacaagcgatgaagcacaaaatcaagaagttgtcgccgctcccaagaagacaacctgggcctcgattgcctcccagccagccaaactaacatcgagagcagcgtccaccacttccaacagcaagaagaagggtcctggcatgccaccaccacccatggttccgggaaagcacaatttagatgttaacgtatgggatttgccgaataacaaaccacctcctgtaccatctccaccctcgccgatcgatttgggctattccgacttgagttctgacttctccatatcgagcaacacggcaccgccattgggcgcacgagccgagaaagtgcacaaggatacggagaacttcctgaaatacgagcacaagggcttgggaaataacaataacttcagcagagccaaggtttcgcccacgggacctgttcgcaggaatctagggccccagcagcctgtccaccatgccgccccacgtccagcgaccaatgccggtccatttgggccaccgaacgccagacgacacgacggcgggccgcatccaagccggaactcggagcgctcgggcaactattccagtttccgcggcagcgagtttgagagtgcttcgaagttcgaataccgcgacgagaaccaatcacgaccggtggaagccacatctgcaaccgaagagctgcctgtcgattcccaactcgtgttggacgaattaaaagacaaaaacaattacaacccaaaagtgttggacttgaaaaaagccggatcggccagattctttgtcatcaaatcgtactccgaagatgacatccatcgcagtataaagtatgagatttggtgctcaaccgatcacggcaataagagattggacgatgccttcaaggagcgacacgaagagggcggcaacataatgctgttcttctcggtgaatggatctggccatttctgcggcatggcacaaatgatgacgccggtcgactacaactcaacgtcgagcgtctggtcgcaggacaagtggaggggcaagttcaaggtgaaatggatatatgtcaaagatgtgcctaacggaacgctgcgtcacattcgactggagaacaatgagaataagtcggtgacgaactcaagggacacccaggaagtgcccaacgacaaaggcatcgaggtgctgcagattttgcactcgtacaaccattcaacgtccatattcgatgacttcttccactatgaaaagaagcaggaggaagaggtgtcctcgaagcgtccgccaatgcatgggcccgatggcaacaaccacgcgcctgccccactcgcccgcagcttcaatcgccaggcggacgacaaggacagggatcgcgacggacgcggcggcatgtcacaaaagcacttcaattctggaggaggagctggtttccgtaatccaggtcataggggtggcgccggcagtggcggatcacacaacaattacagcgagtatcgtcgaggcttcgacattcataaatcaagcagcgactatcagttcaaggaccgcgatggcccggactttgacagagaaaatgactttgggtcccactacgggtccaataaccgaaaaaatgaatacaaacacaataatacgaacaaggccaggttaaaaacccgagatcgtgactttagtactgaacaaattaaaatcggcgtgcgctttaaggacacggacaaggataaaatgcgaagcaatgaatattcataaatttactgagctgctgcggtagaattcttttttaaatgatattgaatggactcccacaatccgttgaattgcttagagacgttaaattataatttttagattttttaaccattgcgtgtacaagataaaatcccgattcatggcgagcatatataacgaacatgtgggatctaggattaacgattaaagtatgataacatttttacgtaattatttattacaatatttatataaatctattgacgctcacattgaacagttcataaaaaaattaatgatcgattttgccgatatatatacaacatttataaacaccaaggagtctgcttcagccattccttgtagttgcactgtaacaatttatacaacttatttgaatctaaagtgtacacgacttatgtatgtataatataattaaagtaaccaatccatcaatta

SEQ ID NO: 215 - DNA, 659 bp, Drosophila melanogaster
tgtccccacttttggtgtgccccatgcgatacgccgccgttctcgtagaggtaggcggaactcaccgctgcctgcccttggattccgatggcgacttgaacatcgtggcttctttcgatcgcagaggcaaacacatctacacaggcaacgccaagggaaaaatactcgtactggatgctgaaacctttgaggtggtcgccagttttcgcattattgtaggcacctcaagtgcaacggctgtaaaaagcatcgagtttgcgaggcgtggagacgcatttctaatcaacacctcagatcgagttattcgtgtttacgactcaaaagaaataatcattctaggcaaagacggcgaaccggaacctatacaaaagctacaggacttggtcaataaaaccacctggaaaaagtgctgcttctccggtgatggggagtacatttgcgctggcagtgctcgccagcatgctctttacatatgggaaaagtctattggaaacctggtgaagatcctgcatggcaccaagggtgagctgcacaaacagaaacgcatccgctcatttctagaaaggctagcaaaggacgtaccaagaattaaaaaccatttgacattgcctaatcggtttctttttagctcttatcgatattatatacgaacaatataa

SEQ ID NO: 216 - DNA, 2291 bp, Drosophila melanogaster
aaaaaatcaaaatcaaaccttgtttctttttcaacggtccacattgatgctggctactgccaggcggtattttttgatgatttaattgcggtcacactgcatcttcaacttgacgcgtgctatttgattaatctctctgaaaaataagtcaaattaaccgataaagtttaaaaaaaggcgatattggaagttgaaacagagcagaatacggtagagatctggtgaaaaatgtccaacgcagacgtgcaatttaactacggccagcagggaaatggcgacaacttcaacgacgacagcaaccagcagcaggatgaggatgaccagtacaacgaagatggcggcggcaagatcgaaaacgtcggcgagagccccaaattcgttcggttgcgcggcctgccctggtccgcaacgcacaaggagatactcgactttctggaaaacgtgaatgtgactaatggctcggcgggcattcacctggtcaccagtcgggtcgacggcaagaacaccggcgaggcgtacgtggaggtggccagccaggaggacgtcgaagaggctcgcaagctgaacaaggccagcatgggtcaccgctacattgaagtttttaccgccacgcccaaggaggccaaggaagccatgcggaagatcagcggacacggcacggccttcgttgtgaagcttcgtggtctgccatatgccgtcactgagcagcaaatcgaggagttcttctctgggttggatatcaaaacggatcgggagggcatactttttgttatggacagaaggggtcgtgcaactggggaagcttttgttcagttcgaaagccaggacgacactgagcaagccttgggccgaaatcgggaaaaaattgggcacaggtatattgagatattccgcagctcgattgctgaaatgaagagggccacaggcgccggtggcggtgtcggaggacgccctggcccttatgacatacgtgatcgtggtgccaaccgtggtggcaatgatttcggcggagggcgcaatgattggggcaacaatggcaactttggcgttggtgccaacaacatgctgggcttcaacaatctgccaagcctgatgaactcgggcaactttggaaacaaccaaggtggaaataatggaaattttggaaataactctggacccagcaatttcggcaactttggtggcggcaacaacggtggaaattccggcaactttggaaacgacagtggtaacagcggaaactttggaaacttcggcaataatggaggcggaaacttcggcggcaacaacaacggcggcggtggtttcaacagtggcaacaacttcaattctccaggtggcgttaataatttcggcaacaatggcggctccaattttggcggcaatggtggaggaggtttcaataacggcggaaacttcgtatcctcgagtggtgttggcaactttggcccgatcggcggcggtcgcaacaataacaacggaaatttcggaaactctggattcggtaactttggaggaaacaacaatgtcggctcgaacttcggaggaggcaacaacggcggtggcggcggattcaacaatggctcgaacttcggcggcggcaactcaatgggcggtggtggcaatttcggtcccatcggcggcggtcggggcaacgacatcgagtattatacaatccacatgcgcggacttccctacacttcatttgaaaacgacgtttttaagttcttcgaaccaatccgaccagctaacgtgcggataaactacaacaagaagggtctgcacagtggcactgcggatgcctacttcgacacctacgaggattcccaggtggccatgaagcgccacagagagcagatgggttcgcgatacattgagctgttctacgacggaaagacgcgtggactcaatggtggggaacacggcggtggtaacggtggcggcggaatgggaaacaatggcggcggaaacttttcgcggcgcatctaaagctcttccatagtttgattacattgaaattaatgtagacgcaagtatttcgtaatattatgatcaagctgatactgctaaaccgctaaggaacccttacaaccatgtaaacgacttaactatcgaacagaattcagacagagacaattggttacacatagaaaccaccaacgtataatcaagaataaagagcacacttttatttaagtactttattctgtagaaatttcaattttaatatttaagtttcaattattaatttaggtttttctaaaataaacttttattttaaaatgaaaatg

SEQ ID NO: 217 - DNA, 1238 bp, Drosophila melanogaster
ctgaccgctggcgacagtttcgaatccatagccgatcggagagcaacgaacgtaggccagaacggagcagagaaacagcaatggagccgcaccaggattcgcccgtgtacgccaactacgaagatatgcgcaactctgggccggccagctccacggcgtacatggtcaacatgggcgccgccggcatggcacccgagccggcacttcgagtgcccggcaccacgcagcagtatcgtggattcaaaacttcggagaacgagcccaagggctgcatggaatgggtggtcaccctgttctccgtgctgatcttcatcatcacatcgcccatcgccatcttcatatgcttcaaggtggtggcggagtacgagcgggcgatcatcttccggctgggcagactgagcggcggagctcgtggtcccggcatgttcttcatcctgccgtgcatcgatgagtaccgcaaggtggacctgcgcacggttaccttcaatgtgccgcagcaggagatgctgacgaaggattccgtgacggtcactgtggacgccgttgtctactatcgcatcagtgatcccctttatgcggtcatccaggtcgaggactacagcatgtccactcgcctcctggcggccaccacgctccgaaatatcgtcggcactcgcaacctgtccgaactgctaaccgagcgcgaaaccctggcccacaatatgcaggccacgttggacgaggccaccgagccgtggggcgtcatggtggagcgcgttgagatcaaggatgtctccctgcccgtttccatgcagcgtgccatggccgccgaagcggaggcagctcgtgatgctcgtgccaaggtgatcgccgccgagggtgagaagaagtccgccacagcgctcaaggaggcatccgatgtcatttccgccagtccatcggccttgcagctgcgctacttgcaaaccctgagcagcatctccgccgagaagaactccaccattatctttcctctgcccatggagctgcttactccgtatctggccaaatatgcccacttgatgggcccgccaccggaacttaagcaatcgccagaaaagtcagataacatagttttagacgcactggacgcttggccgaaaaccaacctatgatttgaatctagggcgttgccagagtttgaaaatattaatgtcttattcattttttttttttttttaataaatgcaattcgcactagctggcagcttcagcaatcg

SEQ ID NO: 218 - DNA, 3203 bp, Drosophila melanogaster
cgattttaagcactgattccacagagcacggtcacacttcactttgttcgccattgctagacaaaaaattgtttcgagcgaaaaaagtagctgatagaaaaggtgaaaatcagaagttaaacgttcagttaaaactgaaaaacagacagaaaagcagtgcttcattgtgcccattagtgaatagtgttagagcagagtatttccttgtgctgcaaacaggaagagattggaattaaagatgcgtggacgcggcggattcattccacgtggtggtggcaccactcgcggtggctactacaataatcgcaattccagcaactacgttaatactcgcacccagggcaattaccgacccaataatggccgctacgagaataactatcacaacaacaacaatcgctacaacaaccacaacaacagcggcggaggagcaggaggcaacagccactacgacaacaggagtcgggacaagttcactcaccacaactcgagcagcgggcgctacgagtccagctcctcgagccacaagcgcagctatgactcatctcgcgaccgcagcgatgatcgcaaacgcccgcgtcaagacgattaccgtcgcacgtcctcgtcgaatgatcgcagcgatcgaccctcgtcctcgtcgcagaacattggctcctcgtcatcgaactatcatcagcggagcagcaccggcggtggtggtaataacggcgggagctcgagctcctaccgcccacgcgatgattccaccagcggcagccggcatcagcgggacggatcgatgggtcctccgaagcggatgatgcgtagcgtggccggcaccaactatatatcccgaccccgtggcacaatgtcgatgaggggcggcatgatgcgcaccgggatgcgggtgggaggaatgcgcgttgtgcgcaccagggtcaacgagtcgaatgacctgcgcaccatgcgccgccagctgctctatgcacagcagaaagaccgggctcgcctgctcaagattcagcagctgaaaagctcgttgcgacgacaacgccagggcgggaattccagcgacgattccagcggcaaagaggacaaggacggcgaagatgctgagaaaagcaagaagaagaaaggcaaggacaaggacgccgatggaggcgatgaatccgacgacgacgatgacgatgaagaagacgatgatgagaaggacgagaagagcaagaagacttcgcctggtaaaaaacgcaacaagtcggccaacaacgaggacaagagtgaggccgaaggtaacgatgatgacgacgatgatgatgatgagcacggtgatggcgatgacgatgatgacaaggacctaaatgagtccgatcccaagagcgccaaggccgatgacgcctccgatgacgaggatgtcaaggtgaagggcgacggtgaggacggcgatggtgacaaatcggacgaaaaggccaagtcatcggtcgagaagtcaggtaagaagaaggacaaagacgacgcgaaggactccaagtccaagaagtcatcatccaccaagaaagagcgcacgtctcgcaaggacaaagacaaggaatcatcgggcgatgatcgtagcaaggagcgacgtagctcccgtcatcgggatgaggaccacaacaaccgcaaacgcagcttcatcaaactcatttgcgtccattgccgcatcaagtgtgttacatttaaggagtataactaccatctgaactcgcgctcccacaagaactccatgcgtcaggtggccctcaaccagcgagctgacctgcagcgtatgcgtgcccgccagcgcaccacacagcgcgagatcgaggagaatagcaaggaggagcacgagtcgcgctactgtcgtctgtgccgcttggcctaccgccagcccaagaatcttcatcaggcctccgaacaccacaagaccattaagaagttcttaatgccctattgcggctcttgccatctggccttcaagaatgccatgctctacgagaaccaccgctgctccctggatcacattaggaacaaggcccgcaacgatgaatccggatcggatgatagcgtggatgagcgcgagatagatttgaataaattccacactgtagactcggtgggcgagatcgatgtggacatgatcgacgccgatgtagatgccatggtcaccgaggcggaggccgctctgaaaagcgaggatgaggagactcgcaaacgcgctctgattggaccggactatataaaggtcatagaggcattctactgcgagctgtgcaatcactattccgccaaggctgatgatgtctcgttagaggactacaccaaaaagcattgcatgcagcactcccatgtgaaggctttcctgcgaaacaaggaggagaccgagaagaagaacaagacggaggagggcgatgaggacgatcacgatgatgacaaaaaggccggtgatgatgacgccgatggcgatgaggacatcgatggcaagttaaacgaggatgacgacgagtacgatgatgatggtgatgcagaagtagaagagggtgatgcgaccaatgataaaaagatgtgggaggaggtggacaaggatctgggtgacctcctggcagaagtagagacaagaggtcataaagaagatgaggaggatgaagaggacgagtctgtgcttaacattgacattgaaagcgagaaaaacaaggcgaaagacggcaaagaggaagcgaacggcgataccgatgagggagctgcgaaagaaaacgcgccggtggccaagtcgccggagaaaaagcatgctgcctctgctccaaccacaccaacggccaagaccaccgctgctgccagccagccggcaaagatggcaacgcccaaaccgactgcaaaagcaaccaaacctggtccggcttccacgaagcgcaatgtcttggtcagcgtgaagcgcacttcggcggccgccattaaagctgccactaagtccgccagcaatgcggcagccgccgactccaagtgagcgacactcgagcgacagtaatataatagtaatagcaataaccaaacccagtgattgggttgctacaaacatatttcaaatatataactaaattataatgtgctcaaacaacgtgcactcgataatgcccagccagagctgcttcgacatctggccgccgagcccagcgtgcttaataaatgtctagacctaactaaaccaacct

SEQ ID NO: 219 - DNA, 6351 bp, Drosophila melanogaster
acagtcttgtttttttgcgtttaggttacgaaattggcagacgaatcttcgttgtgccagttgaaataagtagatttaactaacaacacaggtctaaattgctcgtgaatacaccacgagccaaacaaaaaaagaaatagcaacaacaactactgtcgcaggaatagcaaggacacacggacgatagagaaaggaagaaagatagagagcgagacgtccccatcgcacacacgaacatacacagccccgctgcaattattttgtttttctcatcctcaccaggaaagagaaaaagagaggagacagtgcgagtgcaagcgagagcaacgatggatcgctacgacatggaggacgtcgttgtggcgccccctgccgagtgcagttcgccgctcaaggagtggcgcctcaagcgccaggcgggcacactagaccgctccgatatcatcgagttcttaaagcgcgagtctcccaagtattttgattaccagactagcgctacagttaaagataccaatgtgattactctaaagtgcatgtttaaggagtcgctggccaaggaggagatcatcgatgtcgttgtggagtttatgctgggcgacaatccttcctccgcactggagaagctccgactggagggcaacacggccaccgtctgtggcaaggtctttaagaacggggagcccacctacagctgccgcgagtgcggcgtcgatcccacctgcgtgctttgcgtcaactgtttcaagcgctcggcgcatcgctttcacaagtacaagatgtccacttccggcggcggcggctgctgtgactgcggagacgacgaggcctggaagaaggatcagtactgcgagctgcatctggcaaatcgcaagaatccgctggagagcaagatcctgaccgacgcagtacttgagcgggttgagatctgctttggggcaatcctcgccttctgcgtgagttatctggaaatcgagccaaacgccagtctacagtgcctggatggaaacgtggaaggcggccaagtggacggagcgcagtattgcactgtgctctacaacgacgagtcgcacacgttcgaccaagtcattcagacgctgaccaaaattgccaagtgtcgggcaaaggacgccatggaaatcgtggcggcaattgatcgcgagggacgagcggtggtcaaatgcgatacatttgaggagtgcaacaaactaaaggtatccatcgagaaccaaatgattctgccgacctccctggtgtcgacggcacgcaacaatcagtcactcaggacatcggtgctgcacatcggggccgtggcctgtcagcagtttgccctgcagcttctcggctggttccaggagttcctggtgcgacactacctcttccggaagacgttctccgagttggtgcagcgcaagcaggagacattctgcatccggcacatccttgagtacgacgtgaagctttggaagacggcgcgcacctgctggcaccgcctcctgatctctggtatgcttatggagtacgacaacaaaatgatcctagcccaggagttttcgcgacgctacgccactattgtggaggactttatcagcgatgatcatgatcacgccttttcgattgtgtcgctcagtgtccagctgttcacggtgcccagcatagcccatcatctgatcgctcatgagggcatctttgacaagctgctgcacacgttctaccacgttgccatcgagaagttcattcgtaacaagacgctgcactttagcaagaacatcgccagcctcaccttcttcaagcgggctaactacatcctctacgatctgcgatacctgctcagcctaaagccggatgtgctgagcaatgatttacgaaacggtttcctagaaggctgccgggctttgatgcgcgttctaaacgtgatgcagggcatggagtcgatgaccagacagacgggccaacatatggactacgagccagagtgggagtgcgccttcaacctgcacatcaagctggccacgaccatctcgcaggtgattgattgggcgtccggcgatgtgaagctgctgcgtaagctctacaagatgacaatgcgggcgctggtgagcaacagctttattgtgggtggcgagaaggtcatgcagccgaaaaaagtggcggaccatgtagccaactgtctagtttacgacatatcagtgcagccggtatccatccacttgcctttgtcgcgtttcttcgccggaatctatctgcacttgggtgcccacgatttaacgtacgacgggctgcagacggaaacagaagcgttgagcattaagctaacgcccagggagattatagaaccggttttgtgcacccaagcaatgatcgcccaggtgggcgcaggactgtggcgccgcaatggttacaccctgctgcatcagctctacttctaccgaaatgtacgttgccgcgtggagatgctggacagggacatagcctgcctgcagataggcgcctccctaatggagagcaacgagttcctgatccatgtgttgaataggttcaacacgatcccctggttacaggaaaactactggtccctattgtcgggtaatgaaatgaacgatgatatcattcgagaggcgtcaatctttgacgagttcctggaacttctgatcgtgatcattggagaacgttggatgcctggcgtttcgatggtgaccgaagaggatcgcctgcgcaaggagatcatccagctgttgtgtatcaagccatactcacactcggagttgagtcgcgccttgccagatggcaatagcggaaatagcgacaacgttttcgaggaagttatcaacacggttgccgtgttcaagaaacccgttggagccgacagcaagggggtgtacgaactaaaggaacatttgcttaaggagttcaacatgtacttctatcactacaccaaagaggacaagtccaaggccgaggaactgcaacgggagcgccgaaaggccaagaagcagcttgtctgctgcccgccaccaatgttgccaaaactaacaccagccttcacacccatggccaacatcctgcagtgccctgtgttcctcaacatctgcagcttgattatggaaagggctttaaatgcttacagtcgcagctttaccgaatcgcatcttcaaaaggtccttcacctgctgggttatgccattcaggaggagcttagcgagcactatcccttcttgagcttctacgagcgttcccaggagtacggaattctggagaagttggaagagctcgctcgctgcccgaggttggaggctcattatgactttgtgctgtggaccatcgagcgcttcaagcagctgcaggccaagcaggctcccagtgatggtagagcaggacccagttgctctcagcaaggaaccggagggaaattgtcactcagcgctgaggagcaagcgcgagaggagagggagaatcgtgctcgtctagccgccgagcgtcgagcccacattatggcccagatgcagaaagcccaaaagtcgttcataagcagcaatgcagaaatgtttgcggacaccgaaaacgaaacacgcaaggagtcagcatccacgggtccaatggattgggaggatattccccccgaggaagaacagggagcagtggcccttgagtcgaaggtagcctgcttggggccggaccgcaagttttatcacggcaccgatgatacctttaaatgcatcctctgcttcgagaactgtgccattagccgtgggggccggcaattggttagctctgcctttgtccaaacctcgcgtgtgatcttcactacgcccaatttgcgtaatagtcagagcgcactgcacattagttgctgcggtcatgtgatgcactacagctgctggctggagtacttcaccaacgaggagttcaaggagctgcgtcgtccgcaccgcaatcgtgcggccctagcccaggccgccaacgtggagttccaatgtccgtattgccgaaccctaagtaacgctataataccggtaaccgaaacgctgcccgctttttcggcgcctccttcaccgaacgaaagctatttaccattggacagtttcgtggagatcatgagcacactggccatcgaactgggtaacgtgaaggaccacgaattgacaacacttccaagtgtgtccaacattttgcgcttgtccggcgtggtcggtggcttggctcaattcgagcggagcgtgcagctcatcaagaatcctcctagactgcatgctgactacatcgaaggaattgaattccttaaaaaagccctgctaaataccatgaagattcagcagtcacatctaaaggaccatccagccatcgaaagtatcgaaatggtacccatactgtgggacagctgcagctacacgctgcaggcactggagatctatttgtacgcggtcgagaagccattgaaggccgagctgtcaatgcgccaccagagctgtgccaggaacttggtgagggcttgctcacgcagttcggccttggaatgggaaactgatcttccattgcttccgccgatgcgttcccaggcggagttttcctctagactgctggatacaatcttcaatcaaaatgacaccagtgtgctcgagtgggactgcttccgcgtgctagtgccgttccagtttggagtgctcaatctgatggtacccgagaagggatataaaacaatcatacccagcggcagcatgttcgacttttacatcatgcagactatgttcctggcccagctgaccaaggcggtcctctgctttgacgtggagaaggagaaggccaaacgagcggagaaggcgcccaattctgaacttacacagttggattacatagagcagctaccgtcacggattcgggacaacatgatcgacttttatcgtcgctacaatatcccagcgagagtgctgcagaagactaaacagaaacagctggtggaggaagaatcggaagagaatcagggtcatgggcaaacagtggtgataccctgtgaatcgcatcatttggcccttcttctcgagtacgtgcagcgacagatgagctcgttcctgcgctgctcctgtctcttctatcgctttctcaccgatgtggatttcccagacacatttcccacagatcaaccggatcgctttgatctgatgtgccagtacttgggcctggaccccatgctgggtgtctactttgacatggagacggtatacgccaccatgatgcactcgtttgcctcgcatcctcacattgaccgtgaagtggaacagcgttgtcagcctgacgcccgtcgttcccttcaggtggaaccttgcctgcgcccgctgccccgcttgaaggtactgtgtgatgacttcagcgatttgatcaacagcgtctcggacatcttctgtccgaacaacgagcgcgaagagatgaagacaccaacgatgtgtctgatatgcggcttaatcctgtgcggtcagtcgtactgctgccagccagagctgggcaaggtctcggtgggcgcatgcactcatcacgctcacgcttgtggcgccgaagtgggcatctttctgcgcattcgcgactgccaggtggtgtacctgggccgtggcaaggggtgcttcgtcccgccgccatatttggacgagtacggcgagacggatatgggtctgaggcgcggtaatccgctgagactgtcccaggcggcttacagaaagatctacctgcagtggctggggcatgggctgcacggcgagatcgcccgtctgaacgacaacgccaatgtggcagcggcggcgcagtggcatcacatgtagtcctccgcaggcaccgagaaggaagcagaggacaggcagcaaaatggaaatggcggcagtctatgtgattattacatactaacattaggagagcctatttttacgtctaagcattttactacttatccgttttggagaagcgctcactcatccagcgagccaaccatgcacccagccagcacctccatcccacacagtcaacgacaccagccacgaacacgccatcaccacacaatcctgtccagcggcccccaagcggcaactgtaaccattggttgattttcttattaattaatattaattgataacaatattcttattacttttttgagctatcgttagtaaacttgttgatagtttgagcggcccagtgccctcctctagttatatatatgtatgtgtatacatatatgcatatgtatatatatatatatataatcaaatgctaaaaaaaatataacgattaggttagatttttgccagcacttcgaatgttgccgcgcagcaactaaaggaagaaaattactttaaaataaaggaaaaataa

SEQ ID NO: 220 - DNA, 1598 bp, Drosophila melanogaster
tctgacataaggatgattttttgatctatcttgactacctactgttttgttatgcagtaaaatagacggcggttaagctaaccttcttaaaatatgaaaaattttctccgtaaccacgtacactggttttttttttactaagactgcaaaactgtgaggaacatacccggcatacactgtggatatcatacgagacggagaaatcttttaaaatactttggcaagccagcttataacaatcaatcttcaaaaattggattgttgtacaataataatattgttaggaccaccaaccgactgagaacggaatcagctcacataaacttactgctacaacccgaaaaaaattttaacaaggaggcagaaaggaacgttttgttgagaaaaatgacacttcctagtgcggctcgcgtgtacacagatgtcaatgcgcacaaaccggatgaatattgggactatgaaaattatgtggttgattggggcaatcaagacgattatcagttggtccgtaaattaggccgtggaaagtattctgaggtcttcgaggccattaatattacgaccacggaaaagtgcgttgttaaaattctgaaacctgttaaaaaaaagaagataaagcgtgaaatcaaaattttggagaacttgcgtggaggaactaatataataacacttttagccgttgtcaaggacccagtttctcgaacaccagcgttgatttttgagcacgtcaacaacacagatttcaagcaactttaccaaacattaactgattatgagattcgttactacttgtttgagcttcttaaggcacttgactactgccacagcatgggaataatgcatcgtgatgtaaagccccacaatgttatgatagatcacgaaaatcgaaaattgcgccttatagattggggacttgccgaattttaccatcctggtcaagaatataatgttcgtgtggcttcgagatactttaaaggtcccgaattactggtagattaccagatgtatgattactcactggatatgtggtcactaggttgtatgttggcgtcgatgatattccgaaaagagccatttttccacggacatgataactatgatcaattggtacgcattgccaaggtgctgggcaccgaagaactctacgcatatttggataaatacaatattgacctcgatccaagatttcacgacattctacagcgtcactcacgaaagcgatgggaaagatttgtccattctgacaaccaacatctagtttctcctgaagcactagactttcttgataaacttttacgctatgatcacgttgatcgactcacagctcgcgaagcaatggcccatccatatttcttacctattgtcaatggtcaaatgaatcccaataatcagcaataagaagttttttcattttgatgaatactgtaattcgagtttgggatagaagccatttaacaatatgataattatgcaaaaaaaaaatataaaatccgaagaaaaataaaataacttaagctactgtcttaaaaatgacttcaactgttcgttaagggattaaacagagaaatcgaataaattcctcacagtataacatctaa

SEQ ID NO: 221 - DNA, 3122 bp, Drosophila melanogaster
gattggcaatcgcctgcggacagcgcaggacagcggtaatcgatagtcgagattgcatacctgatatcatcgtcttcgctacaatatttgcctttaccggttcagctgcagtacaaaagtcgatcaatttgagtaattattaacaatttggcaaaatgagcagctccgaggaagtctcctgggtcacctggttctgtggacttcgtggcaatgagttcttctgcgaggtggatgaggactacatacaggataaattcaatttaactggtttaaatgagcaggtacccaactatcggcaagcgttggacatgatcttggacttggaaccggaggacgagctcgaggacaatccactgcagtccgacatgaccgagcaggccgccgagatgctctacggcctcatacacgccagatatatactaacaaatcgcggcatcgctcaaatgatcgagaaatatcaaactggcgatttcggacattgtccacgtgtctactgtgaaagtcagcccatgctgccattgggtctgtcggacatccccggcgaggcaatggttaagacctattgccccaagtgcattgacgtgtacacaccaaaatcgtcgcgtcaccaccataccgatggcgcctatttcggcactggatttccacacatgctcttcatggtgcatcccgaatatcgtcccaagcgtcctactaatcagtttgttccaaggctatatggatttaaaatacacagcttagcttatcaaattcagctgcaggcagcagccaattttaaaatgccactacgagcgaaaaactaataaaataaatacaccaccaacaacaacaaatactacaacacaaacacatacgcacgaatacaacaacaaacaatccatttaactgcatgtaaacgaaacaaaaacataaattgaaatgatagtttacaacgggaagaccgatagacagcaacacacaacaacaacaacaacaacagccacactgagagacggagagacaattgtattgaggtttttaaacgctgggcgcaaagtttcatttatataaatataaaaactaaaaaaacaacacaaaaaacaaaaaccaactgcgtttgtatttcaaaatgaaaagaaacagaaacagaagaaattgtataacaaaacaaaatagttaaaaggacacacagcaacacgcatatttatttagagcccataaacattcaaaacatgagaaacttcatgcgatgttgatttttatttaaaacactgcaacttcttattaatctaaacttcattcagaaacatgtatttatgttaaatttgaatgttaccgctgagcagaatatccttcgcattgaagtttaagttcaaggactacaagcataactctcaaatacacacacacccacaaacgcctacacacacacgcttatatatatatatattattttcttcagtcaattaaccaattatgtatgtgtttttatatgttcgtttcctcacattttatgtatgtatgtatgttttgtgtaacattttaagacacaggcagtgcaacacttgaccaaaaaaagataaaaagaaggaaataaaacaaacaaaaaggatactcgaattagacagaaaaagagagtgtgtgagagagagagagagagagagttagaagtagagcgataggtaaaaagaaactaatttaaagtagagaaaacaacgatataagcaacatagtacttccaaataataaagaacacaaataacgatcagcatttatgtaaacgacaacgcaaataaaaaccctgtataaattccatagcccgaagcgccagtcaaacgcgcgaagattcccaaagtagtggccggcaagaagatccctacttaaggaaagaagttaccggaaccccaactcccaaagaagtagacgaaaattaatgaaaccaacaaaaacatacagtacagtcatccccatccaaccgaacacccactcactcacccactgatttacacacacacatcgacgcgctcacacacatagataccgcatgacccccctaataccaacacccacccatacacagaatgaatgcaaatgaacggaagcaaaagcaaccacttggaacataaggatgtggatcgaagaagaggatgaagattggcagcaggacacgagcaacgaaccgaacgaatcaagccccaaaattccaacagacacacacacaatgaaacaagtacacatacacacccacacacacactcatgagcatgcacggacaagcggaaagcaaaacaatggcagaaggatcccttttccatgatgtgcacacactgttatccaaccgatagttacggcaagtgttgccctatcgttcccagaagcaataacaaacttgtagcagtgttcaacaatcaatcaaaagcgcaataagaaaacgaatgataaataaattgatatgtgaagccagcattaaatttcgttgcggattgtttgtgttcgttcagtaaagtaaagaatacaaaaaaaaaagaaaataacgaaacgtacataatacatatatagctttggctttgttccagttgtagcggcattaatcggtatagtttagttttttaagggtccaaaattggaaacttttccatttctaattctactgaattcaaatcgccctccccttgttgttcttttctttttctaattcttaactctaaacgtattgtatgtagtgcgcaaaagcattttcacccatttgtaataatgtagagaatagaaattcttctgccaaaacgaattaattgaatttgattttttttttttttttttgttaagatcaatatgaatatttgcgtaattaggagaacgcaaaacaaaaaacacacaaacaataagtcgtgaagtgaagaacgttttttaagaaaattagaaataaagtataaataaatatatatatatatatatatatgaaaatctatatagagatcgatagaaaggccgaggaccgttgataagttaatctggcgtgtgcagaaaactgtttacaattaattgatgagaaaataaaacgaaacgagaaatgaaaataatggagaacaaaagtaataataacaataactaaaataaaaacgaaactgatatttaatacaaaa

SEQ ID NO: 222 - DNA, 1272 bp, Drosophila melanogaster
atggctgatttactaaaggctctgaatattacgggcaacctgctggcaggcctcgaagatgccggcaatctaacgattgcaactgccacaaccacaactttaagtgaaggccttaatggcaatgcaacgaccttggatgccgcagcatccaccagtagtggcgaaaaactcgatcttggcggcttcgatctgcccggcaactactccatactcattaacaaactggagcagctggccttgggcttggattcggccttgggaaatttcaccatcgatcgccaggaggtcgagatcaatttgagcggcgcagccacggccaacgacgttgccgatgtagccgacgatctctttgatgtcctgccagctgctcgggcacctccgccgcatatagcacacggatcaaggatatataccggcgacgatggccaggactttgcccacgtggtcagcgatatctggattggagtcatccttacactgctcatcgtctttgtgatattcttcatatgcgcttgcttcgtttaccacaaattccagcagtggaagaactcataccgtgccaatcacagtgatcccacgatcgagatctgccgccgctgtccgccggactacgaggcggagtccctgccctcgtacacgattgtttccggactgccgacgtacgatgatgcactggaggagttccgcaaggcgggcattatcctcacacccgccatggtgcccatcatcaagatcttcgagtgcaacgagaccggcaaggagcaggcggtgggctacagcctggtggagacgaacatagcgagtgcggatgctgccgcggataatgtgtcgctggcctcgaccacctgcaattgtggcaactcctcgcccacctcatcgctgcccagttacagtgccgccacggcggctgtgatggcagcggcggctgctgctcctccccaggtgatcgaactatcaccggaacacctggcctcgttgtcccagaagcgtctctccctgcagatctcattcaataactcggtgcgccggcagtcgccgctcaggaatcatctgctgagatcccgagcggtgggaaataccgccggtgttggtccatcggaggcagccggtcctgccattcacgggtcgggagctcacggagtccatggcggcggaggtgcaaccattctgcccgttctgcatcgctcctcctctacaatttcactgtccaacgaacgccagttgctggatcaacgcctcaggcatttgcatcatcgcggttccctctactga

SEQ ID NO: 223 - DNA, 1588 bp, Drosophila melanogaster
attgctgtactaaaacctaaaaatccgccgtgttcgtattccgccattttgaaagctgcgagtggaatttggacgcgttgctggattctcgatttcaatatgaagcgccaaaaatgattgcagcgtttgcatcgtagtcttgaaaaggtttttttcattgatttaattagagccactgaaagcggttggccagccagaaaaacgataaaagggattccataccagtctgcgcccagcgccccccgaaacgcggtagtacagaaatatcaaaaaaagaaccacagccggaaaagggcaaaagttttattccgacgacgacgaagagcagaggacagcagcagacagattgaaaaacagcgaaatggacaaaaatctgatgatgccgaagcgttcgcgcatcgatgtcaagggcaactttgccaacggaccgctgcaagcacgcccactggtggccctactcgatggacgcgactgctccatcgagatgcccatcctaaaggatgtggccacggtggccttttgcgatgcacaaagcacctccgaaatacacgagaaggtcctcaacgaggcagtgggagctctgatgtggcacaccatcatcttgacaaaggaggatcttgagaagttcaaagctttacgcattatcgtgcgcatcggcagcggcacagacaacattgatgtaaaggcggcgggcgaactgggcatcgccgtgtgcaacgttcccggctacggagtcgaggaggtggcggacacgacgatgtgcctcatcctcaacctctaccggcggacatactggctagcgaacatggtgcgcgagggcaagaagttcaccggacccgagcaagtgcgggaggctgcgcatggctgtgcacgcatccgcggcgacaccttgggtctggtgggactgggccgcattggtagcgccgtggccctgcgggctaaggcgttcggcttcaacgtcatcttctacgatccctacctgcccgatggcatcgacaagtcgctgggcctaactcgcgtctacacgctgcaggacctgcttttccagtccgattgcgtctcactgcattgcacgctcaacgagcacaaccatcatttaatcaatgaattcacaattaaacagatgcgacctggtgcatttctggtgaacaccgcacgcggcggtctggtcgatgacgagaccctggcgttggcgctgaagcagggaaggataagagctgccgccctggacgttcacgaaaacgaaccttacaatgtatttcaaggcgcactgaaggatgccccaaatctgatttgcacaccgcacgccgccttcttcagcgacgcgtccgcaacggagctgcgcgaaatggcagccaccgagatccggcgggcgatcgtcggcaatattccagacgtgctgaggaattgcgtcaacaaggagtacttcatgcgcacgccgcctgccgctgccgccgggggcgtggcggcggctgtttatcccgaaggtaaactacaaatgatatcaaatcaagaaaagtagagagacagagacaggcgagcaagggagcgttattacaagtaaaaaaaaaaacaaatcgaaacaaaa

SEQ ID NO: 224 - DNA, 4877 bp, Drosophila melanogaster
cggtcacactgcggacaagcaactcgtcgacaacatatatcgtcagcatcgcgagcgggggcagggaggagagcgatcgccttagccaactgaggattctgcatttgcgagagagccagagacaaaacagtaacacggtaccacagttgctcgaagcgagcaattggcattgcaaggccctgatagccctattcgtaatttagtcgtagtgaagccccggacaagaagcccacacctgggcagtgaaatgtttaagagccacttccaggaacgcagcgtataaacggtttccgagaactggccaccaatacacagccaacaagtgcgaggccaacagcaaggtgctcttgtgtgtgtgagagagcgccgttttggtgtgcgcgcgtgtgtaagagcgagagagagacagaaagagaggaaaagagctaaagacagagagacagagtgggagagagagagagagagagccagagtaaaccttaacagcaagggaaggaggggattaggattaggattaggattgggagcagaaccaggaccaggaagatggtggcccaggagcagctcgtcctgctgctcatgctgcttgccggctgccggggtggcgccaacgccatcttggatcctggctgggtgattccctccaaggtggagcagctcatcggcggcgactttaatctgagctgcaccctcaacgaagactactttaacggcaagagcgccgaggactgcccggtggagaagctgtactttacaggcggcggccgcgtctaccgcgattccaagcacatccgaatcctgaacaacaccaccatcctgtttagcgacacgaatgccgtggagcaagagaacgactaccactgcatgtgcgacgagtatgtgatcaacaagtcaaaggtctacgtgggcaccaggccgctcctggtgcgcgacttcaactgcctggactacgacttccagtttatggtgtgcaacttcacccagccgcccaacacggtcatcaccaagtacaacatcagctacaacaccaacaacgactggcgatatagcaacacactggactgcaacttcgactcggcgccagtggtcacctgtaacctaaccgacgacaactacaagcgcttcagcgagaccttctacttccgactgtccatctccaatgccctgggccacgagacgcagccgatcacgatcaatcactttgagcgtctggtgccggcgcgacctggccagaacctgaccctgctcaacaggaccgagagctccgtgtgcctgtcgtgggagatgccccgtcggtccaactacaatcgcggcctggtgtggcaggtgcgcgtcacgccgcaaaactttgagcccatcacgcggcccagctggcgaaaccacacgctgaccatcaaggacacgctctgcctcacggagctgcccttcgccggctacaactacacgctccgggtgcgcgtgcgcgccaaccaaaacaacacgctctggagcgagcccatgatttatgcgttcgccaccgctccggcgccgccgcgccgccctcctcgcgtcacctacggcagcttctatgtctactcgtcggagaaggctatgcgcttctactgggagcccctggaggagcacgagctgaacggaccggactttcggtactccatcagcgagtaccgcatcaacggaacagcagtggatcctggcctcatcaaggtggagtccaactcggcgatgatcgatcactggagcatgagtgccgtccatcacttcctcatccgcagcagcaatagccagggtctgtctgtgaacgccactccgatgacgatcggccccattagcaatcgggacttcaaggtgcgcgagcccaggaacatacgcagcgtctatcatccgaccaacaagagctacacgctcagctgggatccgccgagcgatcagcgggaactgcagaactacaccgttttctggtgcgtgcccaagccgggcctgcagtcggaatgcgagggttcgatacgcttcgcggaggtcgcaagcggtctgcatcacttcaccacgtcaccggaccaactgctcacgctgcacatggccgtgtcggccaactaccaatcgcataatacgggcctacactgggcgatctgcagtagcgacaagaaggacgatttggccaagatggagccgtcgatcgatgtggccaccagcacctcactgacggtcagttggtcggagcgcgtctgcgcagtgatcctggccggctataatctgacctactgccagcgctcggccggccgtccggacaattgcacgacggtgaccatcgatcgctatacgaacaagcacgtcatccagaatctggtgccctacacggactacagtgtcaagatgctgatgtattcggactcgcgggtcagcaagtacagcgacgagctggtcaaccgcaccggagaggcggcgcctagccagccgcgggagttgcagctaatccgcgtgaccagcgacagcgtggagctcgcctggaagccaccgctgctggccaacggcgtggtgcgcgcctacgagggcaccttccgctcgctacatgacaacgtgaccgatacattccgcgtaagcgcctccgccgacgagctggtgaacaacgagaagcccatcacctaccggctgggcaatctcaccgcattcaccaagtacgagattagcgtgcgtgcgcggaccgtctatccatcggagcccagcaatgtgatcctcttcagcacggccatcggagttccctcgccgccacaactgtacgtgatcaacaatccggatcagagctcacgtctcgactgggaaccgccaaggacgccggccggacgcattgatttctacgagatctcgctgcgcgacaacaacgccagctgcctgacaagcaccattctgccgggcaggaacctatcctatgtgatggccacgccgcgctgcaccagccacaatcccttccagctagcggtgcgtgccatcaacgtggagcagcatccgcagttgaacggagcggatgcagcggaaggtgccgttttgcttatgtcgaccaacggcaagggatgcgaggcacgcaccgatgcgctcggcgaagaggagcggctgcagttcgaggcctacgctgccaacatgaccgcctaccggctctacagatccgattggggcatctacggattcatctgtacaccggacacgcacagcgtgaaggccatgtaccagaccattgaggtgaccgtggcgattctcgtgctgggcgtcatcttctacctcgtgtacaagaaataccgcaagatgtccgatatcggtctagtgctgccgcagggaatcatggagaccatgaagaagcccatagacatgggtggcctgggattgggcctgggtccagactcgtccgtcagcggaggcatcgtgtgcacacgggtggacgactcgccgccatacacgccgcaggatctgccgcacgacttcagtagctgcggcagtgagagctcgaaactgctgctgcgcacagcgtcctcctctggtggcggcggctgcgtggatcgcgatggatacgatgacaatcacgagacagggccaattagcgcagttggtccgcccaccagctacctggccatgcggcatggccttctcgtccagaacgacagggagcgcgagagggagagggatcgtgagcaggagagggagcgggagcagcagcaacagcagcgcgagagcgaaatggatcgggagcagagttgcaccaatggttacatcaagcccacacagatgaagagctggggcggcaacggtccctcggataatgatcacacgttctcagttccttcgactgcaatgaccgctccgatgtcccagccgctgtcccagattccgctcagcggctacgtgcccgttcccattccacaatctcggttcaatccggctccagttcaaccgtttgggtcgccagcagtaccttccgccgccaccgcagccgctgcgtcgacctttttcccaccggcccacttgctcaacatggacaactacgtgcaggcctcggatctgcacaagctgaagccgctcgtcgcagctccgttgtcgcaaaccggaggaccagcctttgcgggatcttcgccagcaacttcgccaccgctacagctaccgccggttcacgccgcaagtccagctgccgccacgcccaaaatggctgacatcggctataccaccatggagcagttgcagctcactgggctgataaagccacctctggccgccaccgtgggatcgccgacgcacgccgctggtggggcgccgggaggcggcaaccagcactctcgcctccagccgcaaatcaatggctacgtaacgccgcaggatctgaacgccatggcccacaatcggcacgtcctctaagataccggagcgctcatcatttatgcacgggtgtgcatcattttatcgtttcctcgcgttcgcatcgataattcatcaactcatcttcagccgcatatccttccaacgccatgatctggtcaccggatcgccccagcaaccaaaatccaggacgaggaacccagaacccagaacctgtaaactagaatctggaatctggaaactagaaaccactgtcgggcagctgtttatagtaattagtgaaaactcctcggacgaatgtagttttacgtttgtaatttattttgtattctttgcgatgcgtgtgaggcagaaagtatttgtaacgcaatagtatttttttatatatattcgtactgtacacttacttacccacttaaccatccacgcgtcgagcggatcgagcttatactattaataccctatttacacaatacgcacatcgctgtatttcaatataaagctaattttaaataagattt

SEQ ID NO: 225 - DNA, 1468 bp, Drosophila melanogaster
ataggaaaattgatttctctatttttgtgaattcggtaaattatcaaaattaaagattggaaacattggttgaaatggcgtccgcaggaaagaagggcaaaaagaataaaggaacagttatctccttgcaatcatttctatgtaattctgacgctccagtcggaacaacccaagtctcaaaaaaaatacgaaatttagatggcgatgatagcgatgatggaagtggtacattgccgttggtttatcagcttccaaccgctccgagggcaaatcggatattcgacgataattctattcctcataaagccccatttattgcttatatcaataatttaccatttgacgcaaatgaagatgacctctacgagttctttgaaggtattaatttaatatctctgagactaccaagagaagatggcgaaaatggtcgttccagaggctttggctatgtggagttggaaaatcgagaggatttaattcatgtacttagcttgccagacccctctattaaaggtcgccgcattcgcattgagctatcgaatgaaaacgaccagcaaagccgccaaaaaagtaataggcggtttgatggttttggaaataatggagataatagggattccggaaattggaggcgagacagccaaaacaacggcagtaactttggttattcttccaattttgaaagaagctttaatagagagagaaaatctttaccagatagagatgatgtgaacactcctggatcttggcgcacgagcgcaaggccgcaatctattgatacttcccctacacgcagagaagttgaacaagtatctgaaaaatatcgcgaaggtcgagtcaaaatagcagacagatattcccgagaagagacatccaaagttgaagaagaaaggccaaaattgaatttaaaaccaagaactttaccattgccagatgtaaagacaattgaattcgaaaaatgtgacgttgatgaatttaatttggataaacaaggcggaacttcatcattaaacgtgtttgggtctgcaaaaccggtagatacagcagcaagggagttggagattgagcaaagattggctctcgctcgaaaacaggataaggggcgcagagaacagggtttaaatgaaaaacttgccgagctccaggtggataaaaatgataatgaaagtctaagtgcaacagttagttggcgcacgaatcaggactacaaggaaagcgacaaaattaataagtgtccaggtgaaaaacagcgggacgaggaaatccatagattgaatcatgcccgaggccagtttaacaggccggaacttttgagagaaaaacctaatgcgaacggagagagcaaacgagattgtcgcaatgaccgttctgtgtcgaagaaaacttcccagaatgatcttgttttgcaatcatctaataaatattcaggactcgacaatgaaggatcggaataatatatttgtgtttc

SEQ ID NO: 226 - DNA, 3687 bp, Drosophila melanogaster
atgaggcaacgcaactgctccgtcgaccaactgccaataagtgagctcggttattagtttaatttggcagaaagtgccataaatcagcgtcgaatatgatccgccccacttaattgccacacgcttttcattaatttttcgccgattttgtttcccatttctctcgttgcagaaagctgtcaaggacctcatgaaaagcgcctgctgaaccatctgctgtccacctacaatacgctggagcgacccgtggccaatgaatcggagcccctggaggttaagttcggactgacgctgcagcagatcatcgacgtggtaagtgatcgccggtgatggaaataatccctatttggcctttggtctagctaacatttttgaaaagcatcaaaaataatcaagtataactgagagtaatcagacgtttgcccatcggctgtcggatctgcattcgaatcgaaacaattgttgataacagattgaattgaattgaattgaaatgaaattgaatcgaatcgcgatgcataggacttacatatgtaacgtgaacaggcaaagaattaacaattattgattgcgtctcttataggatgaaaagaatcagattctgaccacaaatgcgtggttaaatttggtaagtgacatgtacccgtcgtttttgtgacaacacaatatcacaactattcttttgtgattgtgacttacgttatgcgtttttgtttttttctttttgctttttgaggtttccgttttggcaggcgaaaagcgacacatttttatatacaataacttgttccaccaccaaaaccacaagtttttttttttattgtttcattttgttttctctgaatttgtttttggcattcaataattattgccccacaggggcttctttatcaataaataaatacatatttgcgtatgcatatgtgttgttccaatatgtctgtgtgtgcgtctgagtgcgtgtgtgtgtgtgtgtgcgtgcgtgtatatgtgtgagtgtgaaagcctgcaaatttttacttttgtttgttcttttgacattttatttaccatttaaacacatttcaattaaacgaacgtttaaaatacagcacaaataaaatccaattataaagcgaaaatgttttaaaataactggaaaggctttgaagacaatttggtggcagagcctccttggaaatatccttttatattccagccattaaaaaatactttatattagctgcgcgaatccttttggccacttttgatttacacaaatttcacttgaaatggacgtgatggaggagaaatagccttctactggacaagggatggcccaaaatggcattgctaaattggcagaaattgccgggcagaccataaacataaacaaataaatcaaaacaagcgacccaagaggacataaataaaatttatatttgtaaagcgacagccagttttttttttgctgcgcattgtttgtgcccggtctcacctgaaaactcgaattgcaatcgttttggccagaaccataaagcgaaaaccattcaacgagctgcagacaggaaacccttttcaaaaaaaaaaaaaaacaaaattaatagcacacccccaaccttcgagccattcacatatctacatacatacatatgtccagaggcggatttatgattgcccgtcaattttcaatttccttcgaaaaaaaaacacctttttccgcctaacaacttttgtaagcaactaattgtcgttccatttatgaaatgcgaacgcaaactttaagctccatcgcagcattttcaattaattgccttttatgaaaacagtttttgttgatcagcccacgtgtgtttagttgcttttatattgtcgtgtttggttttgtgtgatttacatgctcgtacatattaatacattttcgattttgttataattattttgtaacttttttgcatacatcctgttttttcctgtttgtgcaaacgtgaaatgacaacattttatcaattatttgccatgcggcatgccgtgtgaataaatgtgcttagtcgggaaattatatgtccgttggttacagttgcccttgctaacccttcataattcccaattaaagtagaattctcggggggattgggtaatgacagtcaagggaatacgaattcatgcaatttaattgatgcaaacttgcctagtttgcaagtcagttttaagccaacaactaaattagaaatattttgtactcgtttggtaaatcacaaatgtggcatagatatgcgtaaccccttccagtggaaagtaaccttcgaccccaattagtatgctccattaagtgcattaatcgattgacaaaatgatttacaagactattaccgttagccattccacaacacccatccaccgcccgatttcaattatgttttacttgcattaaagtcaccatcgttgtgtgtgtatgtatgtgtgtgcgtgtgattgtgaactagtgtacgtgtgtgttttttacggattatgtttgatatacgtacatatactacataccatatatttttgctgggtacatgtcataaagcgttctctgattataaatatctgagtaaaaggcaaaagctgcaattaaaacgcaaccaaaaacaaatacaaaacaaaaaccaaaaaaaaaaaaaaaaaacaaacaacaagaactaaagtcgtgtcttgcatgttgtttaaacgaagtgcatttaaaaagtgaaagataaactgcaaattccaactcggtgtattctttgtatctatatctatacgtatatacatatatatatatatatatataatggcatataaatgtatctgcatattgcgcaacacaactaacaacctaaacagccaaacctactaaaaaccaaaagatatcgatgaagttatgactttaatctgctcgcccctctccccatctttcccatctaatgctcaatccttcgcacatcctcacgcataaattatacaattaaagccaggacatctatgcgttggcaaaccaaatgcattttaatttacacgattaaatatgtataaaataatttgatttatgcactcgccattcagtacagattgatgggatgggttgcgggcggggaagggatcaaataaaagggaattgaaaccgcatcgctttgattttcagtggcataaattataaatcgatacgaatggaggagatttatgaatacgccagccctgacattttcagcggctcctggtcacagtttgcgcaattactcaaattgcagctaccatcgataatgaatgtccttcgaaaattccctctgatgctggggattacagcccaaaaagtgacaattggcaaagttttgcaattgccgtcaagaatcttgaggtcaccacgtagtcgtggctaaccaaaggttactccttcagcatgtcctcgttccttctttcgtcctgctgattgccatctagctcgtgatggtgttggtgacgatgacgatgatgatgatgatgatgatggcccgtcatggcagccagttgcaaccgaatgccactgagctggaggaacaggacgaaaggtcaggtcgaaggctccttgggcacgacattaaaatgcacattgtggctgggccaccggccaccatcagcatccaagttaagaaaaataaagtcattagcatttttcggctaacaccaaagcactttcagtggatgtaa

SEQ ID NO: 227 - DNA, 508 bp, Drosophila melanogaster
atggcactgggcgaatgcacggaatgcatgcagcagatgcagcatcccaagctgcaactggcaactggcaagatgcagcagcagcactgcctctgtggtcctccgctcccaagtgcggcccataaaacctggcaaatctgcgtatttcacatgtcaagattttcgcgaaacagagaagaacaagtgcaagatgtgcaacgctccccgcttgacagatttatggaatttgcagcaaaagcaactgcatcagcaacagccacagtcgcagcagaggcatcagcatcagcatcagcatcagcgtcagtggaaaacaaaagccaatggagtggagcgtttttcttatttttggtgggaagaggttaaagggatctacccgaagatccccttcggaacggacgagattagtaggtggtcatgcaatttcagggcaattaagaacaatcgacgacttttgatggattggacgaggagccgcactcgggttacagttattcgaggtatgccataa

SEQ ID NO: 228 - DNA, 5085 bp, Drosophila melanogaster
aatcgatatcgtgaggtgcaaattgtccgatgaatttcactgaaattcgtggcttgtattgtagcttcgcaattgcagcttcgtttcgacagcaggcccactttcagatcgaaggcgtctataatcgccatccagtcccgtcgccctgttcccacaacgccccacaaatttcgggatctagctggcgtttcgggtgtctaatttcggaccagtgcactgtgatttccgatttccagtttactttgctgacggatcgcccaagtggcgaagtggttcttgctcggaaagttggcgcttgctaaaagaaggagcagtccaggtggttccccgccagtggcatcaatggaactcgcgctggagtttggggcaaccttgcaactgcaagggtaagagcatcgccgattccaggagcattcgcagtaagcccaaaaatagcaactcaagtcagtcgcggtggtcattgttattggcaagaagaagaggaaacggatagaacgcggcaaattcctaggaaagctcccatgatctagcttcagtgcggccgcgtaaggaaactgctccagccaaggaactgggcttgcaggagcagcagatagcacccagcccacaagggaccactcaccgacaatcctctcatggccctggccaacgggggagaggatagaatggacgacagcagcagcggacgcacttcgctggcggacagcgccagcctgacgaactcctcgctgcgcagcggcacctcctcgcagagcatccacaccaacgatggcacaatccgtgtgttcaacttcaccaccggcgaatttgagcgtttccatcccaacatgctgtgcgaggagatctgcaatacgatgtgccgccagctgggcattgcaccaattgcccagctgctctacggaatacgggagcactcgacatcgcgacgtccctcgccgctggtgcgtttggatctgacgtggtgcctgcccggcgagcgactcaactgccagctggtctattgctttcggatgcgtttccgtgtgcccgaattggatagccagctggagttgatcgatggacggagccacaagttcctctaccgccaaatgcgctacgatatgcggaccgagcaaatcccggagattcgctatccggagcacaaggacaaatcaacgggactggccgtgatggatatgctaatcgacgatcaggaacagtcggaggatcagcaggcgatgcgctccatcgagaagctttacaaactgtatttgccaccgagcttgtggcgcgcccacagcttctttgtgggctccaagatacgtgaggttttccgcagtctaaaagcgaattcgctgagtgtggagcgtttgaagtggcactatgtgcatcaggtatcccatttggcgcccacctatatgaccgaacagttcacctgcaccgttcagtatctgcccaacgaggaggtggcccgcggtagcggacccatcggcaccagtctggcccactcgacgtcgacgctggccagttctggatcgaccaacactctgtccacgctcaccaccaacaccaattccgttgcactcggcggcagtggcaagaaggccaaacgacgttccaccagcggtggaatcgatgtctatgtgcgagtctttccacacgattccctggagcctggactcaaggtggccagggtcacctccgaggccacactcaagtggatccttgttggcgccgtggaaggaatttttatgatctccaaaatcaacgacacctctgtgcggctggaaatcgttggtctgcccaagggctacgagatgcagtttcagacggagaaggagatgaagtccttcatctcctacctgggtatctacatcagattgtcgagcaaatggatgcaggatctgtgccattcgtaccgcacgccctccctggaggagctgagctccctccactgccatggtccaatcggcggtgcctactcgctgatgaagctgcacgagaacggtgacaagtgcggcagctatattgtgcgtgaatgcgatcgagaatacaacatatactacatcgatatcaacaccaaaatcatggccaagaaaaccgatcaggaacgctgcaagacggagacatttaggatcgtgcgcaaggactcgcaatggaagctaagctacaacaacggcgagcatgtactaaactcactgcacgaagtggcgcacatcattcaagcggatagtcccgatcgctatcgcatacccgcctccaaatatgacaagccgccgctgctgctactgctgctgccaaagaacctcaaggccaaaaagactgacctccagctgagcgaggcggagctgcagcgccgcaatccgcagatcttcaatccccgaacggatctgcagtggtatccagattcgatatcgcttagcgacgatggcatgatgtttacgatgcgcggcgattggatccaacagagtcccgtcaaggatgtgtccgtgacgatgaaaatgctaaagagcgatggcaatttcatggagttctttcgcttggcacagacctggagcctcatccagtcgccgcagttcctcaagctgtacggcctaacgctcgccgatccgtacacaatggtcatggagtattcgcggtatggtccgctcaataagttcctgcactcgatgcccaatgtaacactgcattgtctactggatctgatgcatggattggtgcgcggcatgcactatttggaggacaacaagattatccacaattacatacgatgcagtaatctgtacgtgaccaagtacgatccgaattcgtacgtgctagacgcgaaaattagcgatcccggctatccgcgtccctaccgagaatccgactcgccatggatacctgttaagtattatcgcaatttgcaagcagccaaaacggatcagtttgcccagctgtgggccttcgctaccaccatatacgagatcttctcgcgctgcaaggaagatctgagcacactgcgccaggagcagctactcaggcagaaaaatctcgatggcaacatactcaagatgctcgatcaggacatctgtccggcgccgatattcgagacaatcatggatggatggtccgatgatgagaccaagcgcttcagtcaccacgacattttctcgcgtctcaacacgatcaaggcggaaattctgcccaattatatgccgccacccgagatcgcaacgaatggaactggagacgagaccgtgatcgatagaagcgacataccctttctaccctttccgcgttcgaatatgttgatggtcataccgctgaccagcgaatgtcgagtgatctacaacatggagaacatgatcgggcgcggtcattatggcactgtctacaagggtcatctggagttcaacgacaaggatcagccgcgcgagcaggttgccatcaagatgctgaacaccatgcaggtgtcgaccgattttcatcgcgagatcggcatcatgcgcaccctcagtcatccgaacatagtcaagttcaagtattgggctgagaagtcgcactgcatcattatggaatatctgcaatctggttccttcgacatttacctgcgtttcacggcacccaatctcaataatccacggctcgtcagcttcgctttagatattgcaaatggcatgaaatacttgtccgacatgggactcatccaccgcgacctggccgcccgcaacattttggtggaccacaacggcgatggtgactgcgtcaaaatctcagacttcggcctggcgcaattcgccaattccgatggatattactatgcgaaaagcaagcgtgatattcccattagatggtactctccggaggccatctccacctgcagattctcatcgtattcggatgtttggagctatggcgtgacgctcttcgaaatgttttcgcgcggcgaggagcccaatttggtgccgatccagacatcgcaggaggatttcctcaatcgccttcagagcggcgaacgcttaaatcgtccggccagttgtcccgatttcatttacgacctgatgcagctgtgctggcatgccacgccccgttcgcgacccagtttcgcgaccattgtggacatcatcacaagggaggtggccaccaaggtgacgcacccgacagatggacaccagtcgccgccgaatcagccgacggatgccgagtgactgttgacaactgaatgaaatcgatatacacacacaattaggcataaggtcttttaagatgttagcatttaaactgtacgtttttaaaacaacacaagccagaccccaaaaaccacttgacgcaatccttggcttaaagcgctatcggaagaatcacattgacccccaaccaatcaatcattcatccataccaaatccggatacacttacgccatcgcaagcatttttggattctcgccagatcttagttttatttgattgtgcttaccactggccacgcccccctacctccaatgtcattaagcccacccctcctcccccctcttgacaaagcgaaagtccacactttatatgatatatgtatatgtataaacaaattctcaacctactttgtgttatacattttagacaactttgttaaatattgttaagcttgagcttcaattttttttttgtaatgcccacaccacgcataaacactgaactaaactaaactaaattaatcataacgtgtaaataataattaaattagttaagggtttaatcgcgaaacggcaacacacggtaatttacaaaatgaatggacgtcgacagaatcgaaaggatgctgctgcgatctgttctgttcggcgactaagtcgaaccgcctaatctacgcaaaaaaaaaaaagtaacatgtgcacatatagtcgtaaggtatgtcaattaatgttgatcaaatgccattttaacctacaatacttcgaaacagaaacgaattatatatttacaagctatacaagccactatacaagccggtatatgcacaaccacacacccgcaggcacaataacttattattgctgttaacgagaaaggatatttccgaaataaatcaattttcttacgtgtttaaatgctaacttttattaactgc

SEQ ID NO: 229 - DNA, 1200 bp, Drosophila melanogaster
cgctacgttttctgtgcgacatttgcaaaggcaatccgattgccgccttcagaggtgctgctcctggaccagactactggactactaccgcgccgtcatggccaagagtgatcaggagcttcccgagggatttcgccagctaaagacacaggttgcgggtcacacattcgaggaaagcaacgcggaggcagtgggtcttctgcaggactcgaaggcgggatgcgtactgaagcctctggggaagccggagtgcggcgaacgggagctgcgcttctatgagtcactcgcagaggcaggtgcttcaggtgataatgacctcctggcgctgctccgcggtcacgtcccccggttttacggccccctaaaactggttgtgaatcggcgcgagcgcacgttcctgcgcctggaagacctcacgcgatcgtacgcaaagccgtgcgtcatggacgtgaagatgggtaaacgaacttgggatccagagtcctcgcccaacaaacgaaaggttgaggaggccaagtacgttatgtgcaagcaaaagctgggcctttgcttgccgggattccaagtgtaccttcccaaggaggagcacactcaggagaccacaatcctgcgccacgggaaggactacgggaagagcttgaatgtggagggattcaagcaaactatggccctgtttttcaatgccagcacaagtgattccaagagcaggagagcgggctgtgagttgcttttgaaggaagtactccgccagctgcaggagatcctagcgtggtttcaacggcagcgcctgctgcatttctatgccagttctttgctcatctgctacgactattcaagactggctgatcccccaaagccgttgataaacggctaccaccaaaatgatgatgaccccgccacttgggtgcgggtcaaaatgatcgactttgctcatgtttacccggcagaacagggcttgccggacgagaactacatgttcggtctccagagcctgatagaagtcgtccaatcaatactccaccgatgatgatcaaagcggaccaagaccactcaaagatgtagtagaagttccaatctcattgcaatgagacacttttgtattatcgtctaagccaaatgattagtccacagtagatacccatccgtttaaggaacacgggcggagctactctaaacgtagaataaaaccagattttttag

SEQ ID NO: 230 - DNA, 5170 bp, Drosophila melanogaster
atggacgtcaaggacataaaaggcgccaaggtgacgcatgcggggctgctcaagcacaactccgatggaaccaccgaaacgcagaagatcacccatgccggtctggtggcccggagtcccgagggcaccgccgccaagggtatgaacatacggggcaacgaggacctctgggtagagatccaggcgaacacattccgcaactgggtcaacgagcatttgcgtgaaacgggaatgcagttaatgcaaattcccattgtctctcaggttcatgactgggccaccgatttctgcgatggcacttgtctgtgcgcccttgtggagaatctgcagacgcgtccactgaaaccctcgtggaatcgccgacccgccaaccagcatcattatttggagaacgccaccacggcgctgaagtccatcgaggcggatcacatcaagctggtgaacatcggcaacgtggacattgtgaatgggaacataaagctgatcctgggcttgatctggtcccttatcgtgcgctaccagatcggaaggagcaagttcccgccgcgcaaactgatgctggcctggctgcaggccgctctgccggactgcaggatcaccaatctgaccaccgattggaatagtggcgtcaatttggcggcgctcctggactactgccagccgggcttgttcccgcactggcgaagtctcgatcccagccagagtgtgcgcaactgcacccaggccatggacttggctcagcgcgagtttggagtgcccaaggttctggaaccggagtacctcgcctcgccctggttggatgagctgtccggcatgacgtacctctcgtacttcatgaagcccggtggtcctggttacaatgccaccatgcgatgggtgaatacgcaggtcaaggaccctgtgaagaactttacgaccgactggaacgatggacgcgttatgtgcgaaattattaagggactgggtggctcggcgcccgcaccggaaaagctcagcaccgatcccttccactacgagaacaacattcggaaggcggtggacgcgggcgcccggctgggcgtgcagcccatcctgacggccaaggacatggccaacccggaagtggagcacctgggcatcatggcctacgcggcccacctgcagtgggtgccgccgaggcctccgctgtccgacctggtcagcgtctacctggagagcacatccggtcgggtgggcgaaccgacccacttccgcatcgacgtaatgtcccgggacataagcctcagctcagtacgctgccacgtggttcctccgtccggacagccgggacagcccgtgcggctcaatgcccacggcgaaggagtctttgtgccggagcgctatgggatgcatgagattgtggtggagatcggcgaggacagtctgggcggacacttcttccgagccctgccgcgcttgctgcaggtggctccgccgggaatggcgccctgtgccttgggcagtctcgtcgaggtgctggtcaatgccaccggtgcgcccaagacggaggacatcctggtcacggcggtctcgcccacgggcatctcgcacaactgcccgctgaagaagatcgacgagggacacagtgccatattcaagccggacgaggcaggtatctgggagatagccatcacctaccagggtcgccacatccagggaggccccttcacctgtgccgtgtttgatgcatccggagtttcggtccatgggttagatggagctatgccgctgcgggctcacacctttgaagtggatgcccgtggagtgggtgtttcgggcgagctgcacgtggacattgtgcacgacaagcattcgttggtctgctcggtggagaagatcgtggagaacaagtaccgggtgacttttatgcccaggcagaatggaaagtatcgggtgtacatctacttcaatggctacgatgtcaaaggttcgcccttcatcatgcgtgtgggcaccaaaggaagatctggcaaaacgcgcagcagtccgctccacgacagcaaacaccgatcggagagtccctcgatgcactttgtctccaccacgaacacgcggcacaatgattaccgaaactcctcgctttcgaggcacaacacggccgagaggaccaacagctattcaccgcagtactctcccaaattggacaccactgactaccacagttcgagttccaggtactataagcgggagagcgaggagaaccatgccactccgccgccagctccaccaccagctagtggttcccccacggtcaagtacctaaactccgctgatctgtatacggaaactttgaacgggcgacgggattcgaagacctcgaacagcagctccacgaagaacgactactactacgacaaggagaacgagctgtacagtcagaggcgtgcggtgaccaagcccaagttgacgccaccgcgcgaggagcgcgaactgaccagcaccaccaataccagcagcagcagcagcttccagcagcgccaccagcagctggccaccagtaccctgaccagatcgcttagtccaatacctagtcccacactcaatactcgatcaagcgaagtgcacacccacagtccgttgaccatcaagacgtccaatcagtacgagagttccacacggaatatcaccagcagtccgcggcacgcctccgtttcgcccgtgcaacgttattctcccaatagcgcctatatcactacggccactcaccgcatgggaagtcccttaaccagtcccgttagtaagaatggttacgagtcgtcacgtaccgtagaaaagtcatcgacctacaagtccacctcgaactacgtcaccgattcgaatattcgtgccagtccctcgctttacggaactgccgagcgactgcgtcgaaccggatcccccgagccccgcatcgaccattcctccaatgtgagggtgtcctcgatgaagccggcttccgccaggcgggacagctgggacgtcatcaacaagacgaagcacatgctctcgcacaattcgctcgaatcgctggcgaacatgaccgagaagcagctgaacacggaactgcaatacaatcgcccggatttggaccacgagacgcaccggaacacccaatacaacaagttcgccctgcacaagcagcagcagcagcagtcggactatcgccgggattcccccgatgatggagagcgctacaaacccagtgccattacagtcaagtcacattcgaacaatacgtatacggacaagtccggtggatatacgaaaaccgttaaggaatccagcgagcatgtggttaccgagagcaatggccatggcccctccccgggctatggatacagctccctctccagatttcgacccatagacggcaatgccactggtgccagggccattcgagtgcaggatattccgaatggctctattggacggcctgtcgagttcgagatcgatggctcgagggcgggctccggcaatttggagatcctggtcaacggcgggcgtgtcacctcctcggtgcgctcgctgggaggtcagaggttcatagccagcttcacgccgcacgaacatggaacgcacacggtgcagatcaccttcaatggcgaaacagttccaggttcaccgtggcacgctgaaatcatgtcctcacccggcctaaccgctctgggcgaatccacgcgcctggtacccgccaatacgccggcggtttttgagatactgccgcctcctggacaaagcctgagtaagggcgagtgcgtggcgacagttttgactcctagcaagtcaaagctgaacgccagagtcacccacgaggcggcaaatggtgctgctcgcatcgagttcgtgcccaccgaggtgggcacccacgtgatcgatgcgtccattaacggcacgaagatcgctggcggcccgctgatcgccaaggtctacgactccagcctgatccaggtgacggaggtgaatggcggcgtggtcggccaggcgtgccagttccgcgtagatgccagcgccgccggcgagggccagctggagatatccatcaacgagggcgaggtgcccaatcatgtccaggtggtgggcggtggtcgctgcctggtctccttcacgccggagcaggccaagtcgcatctgattgacatcaaattcaatggcgaaacggtgcgcggctgtccctttgtctgcgccgtggcggacacctcgcgagtgctcctgaatctctccaatctggagctaatcccagtcaaccggccctcctcctttcacatcaccgtgagcggaggtggagctgccgagctggctgtcagcgtgcgcggtccccagggcgagttgcctgtccgggtgaccggagatatccacgctggcttcacggccgagtttacgcccaccaccgttggcggccactcgatcaatgtggagtacaacggattcgccgtgcagggaacccccttcctggccaagtcatacgatgccagcaaggtggtggtgggcagtgtctcgcggggaaccatgggacgcccggtgcagttcaccgtggatgcgggcgatgccggtgagggcaacctggagataacgatttcggccaagggacagaacattcccacgcaggtgcatccgcaaggcagtgcaagattttcggtttcgtttgtgcccacagagtcgtgcgagcacacgatcaacgtgtcattcaacaaaatgcccgttcccggctgtccgattacggttagcatcagtgggggcgtggccgggccccaggtgtccctgggtggcccaggacccgtgcatcagaccaattcttttgtaatcaatcacaatggcggccgtttggaagacatcgaggtgaacgtggaaggacggcgaaatcttttgtactagaatatatataaatctatgcatatacttatattacctatactattaaacgagggagtagtctccgcgctctcccctacaaatatatatatactatcatccaggtgtatatatattgtacttgctaacagtccgaaccacaaaataaccccagactgagtcttcgaatgagcgagactctatgccagcacaataacaaacaaagtatttactaatgtccgattgtttactaatttgtttcatactgattaatgtgtagaattactcgaacaaaaataaagaaaatggtttaaaacaaactcaa

SEQ ID NO: 231 - DNA, 3461 bp, Drosophila melanogaster
agttggggtttaacagccactcgggacggtagcgcgcgccgctcaaacttgttgcgagaccaattttccgaaaatcccaaattctctacggtgcattggccagttcacccaaaaacacccacacacacacacacacagactgtctcactttcgtttcgcgattgattgccagctctccggagaccaagaaccaaaataatagaaaagggaacccaataccaatacgacgccgcaaaccgatcgagttataaatacaatacgcaaataaaaaactaaacaaacagtaaaacgcctagcaaagagccttcaaaacggcagccacaatttccagcgcaggattaggaggagacgtagccgcgtacgctgatctccaccagcactcgcattcgcaccatccgaatccgcatccacatccgcatccccatccgttcgccaccgacggcttcaagctgcgttccgaagagccggtgccgggcttcagctcggcctccccctggcccaccctggagctgggcatggagtggggccggaagctgtaccccagtgccgtttccggtccgcgatccgccggcggcctgatgttcggcctgccgcccaccgccgctgtggacatgaaccagccgcgcggtccgatgacctcgctgaaggaggagccgctgggcagccggtgggccatgcagccagtcgttgaccagagcaatttgggcattggccgcgcccactttgaaaagcagccgcccagcaatttgcgcaagtcgaacttctttcacttcgtgatcgccttatatgatcgggctggacaaccgatcgaaatcgagcggacggctttcattggattcatcgagaaggactcggaatcggatgccaccaagacgaacaatggcatccagtaccggctgcagttactctacgcaaatggagctcgccaggagcaggacattttcgtgcgtctcatcgattcggtgaccaagcaggccatcatatatgagggtcaggacaagaatcccgagatgtgtcgagtgctcctaacgcacgaggtgatgtgcagccgctgctgtgataagaagagctgtggtaaccgcaacgagacgccatcggatcccgtcattattgatcgcttcttcctgaaattcttcttgaaatgcaatcaaaactgtctgaaaaacgctggcaatccgcgggatatgcgccgatttcaggtggtaatttctacgcaggtggccgtggatggaccactattggccatctccgacaacatgttcgtgcataacaattcgaagcacggacggagggccaagcggctggacaccacggaaggtacaggcaacacatccctgtccatttccggtcaccccctagcgcccgacagtacctacgatggtctctacccaccgctgccagtggccacgccctgcatcaaggcgatctcgcccagcgaaggctggacaaccggtggcgccaccgtgatcatagtgggcgacaacttcttcgatggcctgcaggttgtgttcggcaccatgctggtctggagcgagctaattacctcgcatgcgatccgggtgcagaccccgccaaggcacatccccggcgtggtggaggtgacgctatcctataagagcaaacagttctgcaagggatcacccggtcgcttcgtctatgtctcagctctcaacgaacccacaatcgactacggtttccagcgcctgcagaagctcattccccggcatcccggcgatcccgagaagctccagaaagagataatcctcaagagggctgccgatctggtcgaggcgctgtactccatgcccagatctccgggcggctcgacgggcttcaattcctatgccggtcaactggcggtcagtgtccaggatggctccggccagtggaccgaggacgattaccaacgggcgcagtcgagcagcgtgagtccacgtggtggctactgcagcagcgcctccacgccgcacagctcgggaggatcctacggtgccacggcggccagtgcagcggtggcagccacggccaatggctatgcacctgcacccaacatgggcacactctcctcgtcgcccggcagcgtcttcaattccacgtcaagggtcagcagcctgagcttcaatcccttcgccctgcccacctgcaatacacagggctatagcacccaactggtgacgtcaaccaaataatattactactaaatgaggctattggcaggccccaaatccaatccaatacaccccctccatcccacaggagtcgcagataccacgccaatcacaagaagctcgaaagtgcaataaacaaaagaaaatggttccaaaattcaaaaatctattaatatagttgtacattttttgattgaatgccgtttttaatttaatttgactaatttaattaatttgatttggtaatagatttatagacatacgcatagaataccatatcaaagtaatggaaaacatatgatgaagggaaggcatatcatgcaagaacccaaaagttaagaacgggcagaactaattctaaaatagcttacatagcatacattttgtaaatatttatcccaaagtaaataaaaaatcgtaattaataatcggaactgtgaatagaggaaattatacaaaatatatacccatgatgaacaattctaatacgaatcaagatataccaaaacagatacaatttgaaagaacttttggacataattaactaaatgcttgtatacgatactttcttggattaatatcgaaaaaataaataaataaataatgaaaggaaagtcttggaaatacactctgccagtcgagagaaccgaaatcaaaatgttatatacctacatagatatacaaaaagccagatttgcagcatatctacgcgtaatattacaacaaatttataccaaacttttggcaaacatatcgtgcacttagtcctaatatccaccctaagcgaacatatttgtataatgcccatcatatccacaattcaaaattcattttgagcgaaccacttacctatatcaacaaccaaatcatcaaattagacatacatacatttcgctattcaagtcagtgtttgataaactaccgatttgttgactagaatctaagcctagcatactatatatatatatatataggcttaagtttattgtttattgctcgatttgtaggagttttactgtaatttgtattcgtattgtatgataatgtacgcttgcactcctagatctacaaaatattgaagagaaaaacgaaatggctggctacgcaattggggagcggccaatacaagcatatctctataagaaacgcataaacagcagaacttagccgcaaaatcgatttgtaaattacaatacaataatttataataacaatctagcaacgctctctgttttgtaaatcttaacaagttatttaaataaaatttatttaaaataaacgtaatacaccatg

SEQ ID NO: 232 - DNA, 6938 bp, Drosophila melanogaster
tcgtgacgagtacctcggaatcgaaaagaaaaaaacataagcagacaggcgaaacagagcattccgttcaataatgaatgcataagaacgttcgacgcgcgccgagaaccagtctgcatacgagtcgtgcgtgcggccagcgtgttggatatatttttttgaggtttgcgccagtttccaatgcactctcgtgtcgccctgccttctgtaccatcgaatttgaatcgttaaaagtgcgtggaaaagtgtacgaatcgaaaccaatacacggaaagtgggacaacggcgactgagagagctcgttgcgcttgtctctgtgtcgctgcctttgtgtgcgtacgactgagcgtgtgtgtgtgtgtgccgttctgttgctgttgtgtgtgtgtgtgtgcatgcgtgtgcaccgccgatgtgtgcgtgcgagtagtgcctactgcggccgagagtcgagtgttgcccgtgcttcgaaatcgcattgaatcgtatggaaaaatgtgttttacttctcgcccaacaacgccgaacgcctaaaaaagaaaattgccgcacggcgtcgcgcagcatcaatcaaagtgcatagaaatatgagcatgccaatgccagcaaaggcaaaggcaaacgaaatagcaaatccaaatcgcaatcgcgaattgtgcacgcaaatcaaaagcaggcgctcttctactccaccatcttcttttgtctgtctctgagcgacgactttgccgcatggctggcggcccactggacaatcgaatatagcaatgaatgatttacgtcagcagcagatggtagcagcgacatcgtcatcaggatcggaatcgggaacagcggtagaatcggcagccgccacgtccacagcaggatcagccggagcagcaggtcgcccccagtctaactgtagcgctaatagcaacgccaagtcagtggcagcgagcagcacgagcgaggaggagcagcgagttagctccacgtcgtcgccagcccagcgggatcagcagctgaatgcagatcgggaccgggaacaggagccagagccacagcagcagcagcagcgggaggaggcactgcagcaccagcataatcagcccggccatataaccagcaccacagcgtcgcctccgccgacgctgccaccgccgacgacgccgtgcgacgatgccccaagcacaactggagcatctgcatcggccagctcagcatccggagaagcaccatcagcagcatcagcagcgggagcagcaggtggaccgatggccgctacggcgcttgaggtagagagcgaggagcgggatggacataagatcatcctgaagctctccaagcacgccaatcccaactcaaacgcaaatgaatctcagccgggcggagatgagaggcgcgtggagcccctgcgcattcagctgccctgcggcggagcggaaggaggcttggttgcgaagcagcaagatgccttcgatgcggacgcctcttcctgctcctcgtcgtgcgccgaggacgaggtggctaccaccctcggccaacaactacgaaacaccccgcacattgtgccaaagctgaccatccgcgccgcgaacgagaggcgcgtaggcagcgtggtgcctaagctgaccatcaagttgcctgagaatccggctgcttccggctccaactccaactctggatcgtgctcagcagctgtgagtggcgcccagtcagctatgcccgccaagaacgatgcccacctgtccagcctctcgcccgcatccgcctcgtcttcatctgcctcgtcctcctcctcatcgtcgtcgtcgtcctcactggcggagatgcagacggtgcccaagctgatgatcaagacaacgctagccggtagtagctgcatcagcagcagtgaggagcttccgcagcagcagcagcagataccaaagttaacaatcaagacaggtggcggcggtcaggagcacgtgcacacggtcataatgacgcacgacctaaacaacgcccagagcatccccaaactcaccattaaaaccaaatccatagagatgatcgaggacgaacaggcggctaagctggagcagcaattgcagccgctgcccaagctgaccatcaagaacttatgctcaccgaagcacaaggtgcgtgcagtgctcgaggagaagccaccaacggcggcctccaagctggctatcccaaaacccacgcccaatcccacgccggctcccatgacgaatggcggcgagtcgaacagcagtagtcaggaattctgcggcttctccgacccagacgcagatatagctgcgccagcctcggacgacgttcgccgcaattcggacgacatggtgatcgacgattcgctctccaaggagcacgatcccaagatttttcacaatctaccgcccatgcccgccagcaacggcatagccagcggtgggagtaaggccagtaaagccagcaagtctgcccaatcccagcacaacgttgtggacatggtggacctgacctcgtcaccgtcgccgggctcttcgccaacgcatgtgcctaacaacttcacgggacgcatttcgccgaaagggttgctcatcgactgcctgcggatgcaaactgcgatcggctgttatgtgcccgaggaggccgacagtcgcgttaggccagctgcgtcgcccaattcgaacatattgcttagccagctgacggcaccggctaaaagcttcacaacgaccacgcctaaaagcaaatccagcaagtatccccagctaacggagcgcctgatggcgaatggaagcggtaccggtgggggatctgttattgctgcagaaagcgaggcagtcgttggtcccttgcccgccgcgaatcccgcccaatccataatcgagtccattgaaatcctggacacgcctgatggcagcccgagggtagcctacatggacgaggattctaacccgatgctcaacaaacatctccaaactattcacaagctcgcaatggatcacggagtggaacagcgtatggatacccaggacaacaacaacgagaaccacttgaaacgcactaacagcgagggaaacgaatctcccagcagtagactccctcccagcaaacagcgacgtctggacaacgacgagaacgaccagcagacgcagaattgccacgatcccgccagaaagtgcagtgaatcactgcaggcgcttccgccgtcacatcgctcgcgcaagcagaagcacgagcgaatcctgaacacagatctggagggttcgctttttccacccacccaacagcagtcgatttcaacgccggatcaaaatggagccttgtcctcggaggtcgaaggcgaggacgcaaaggcgcaagatccgctagaaccggcgacgcctcagcccccaccggtagcgacgccggcaggaacgggcaagaagcgtgggcggccgaagcgtatccaaaaccagagctcgccggatggtggaggtgcagttactcccaaacccggcactccacaggaggaggccaacagcgctgtcaagtcgcgtcgcgtacaactgctgcgcaagcgactggccatcgacatggtgagcgtgggccaagagcaggcggacatgaaagctaaggaaaaggagtcgtctgtgggcgtgccaaatgcaagagttgaagacgggcttgccgaaactctggaatctccaaagactcgcgaccatcgccccctgagagccacgcgccgcaccacgaccagcacaaacaccaacctgcagcccacgcccaagtccacaaggaagcgccagagcaaggccagtgtccaacaaagccagttgccgccgccgacgatggctcagttcggtagttcggagtccgagtccaacaacaacaataatagcagcatatcctttgccctgagcgcgcagatcgacctcacaatgtgctcgtccagttcgtcgacctcctctggcgctgccgccaaccagcaggtgatcggtggaagtggcagcagctcgatgctacctccgacgacgattctgtcttcttcggatccgctgcccgatgtcatcttccagccaaatgacttctcctctatcatggccacccagcagctgcgctcctcgcgcccctcaagcatcagctgtggcagtaccggcggtagccagccggactgtcacgacgaggacaactacaccagcgcgctggacaattccggagacgaaactgcgttgcctatgccccccacgcggggacgtggtcgtggccggcgatccaggggaggccgcggtagaggatcttcttcggtggatcgggctgtcagcgtcggaggcacagcctccacaacgcccgccacgcagcctagggccccgcgaatgagccgaggagcaagtgccgtagcaaaggccatcgccatgagtcgaccacgatgcgtgggcggcctcaagcaccagcccgatcccgagagacttaaaggcttgttcagtccgtcgccgcaagtgtttgaggaggacacgcgtatgagcgccgatcttagcaacagcaatcagtcgatggccagcctgatggaacccccgctaacgccacagaagcaacccgacttcctcaacaacgaggagtcacagtcgtccatggtgagcaatgtgagcatgatggactccaaccagggtcagtccgccgacgcgattctgggttctgctctcaaacgtccaaagaagaagaagatggaaacttgcgtggccgaagacaccgactacagcgcctccagcatcgccgagtacgactggccaccgcctaaaggttgctgcccatcaaagaatcgggacaccttcatgattcaagagcaggtggcgctctatctgggcattaccagctttaagcgcaagtacccggatctgccacgccgatcggtcgacatggaggagcgcaattggctgcaggagaaggggctggttagcgagaagttgtgcgacctgggcatcaccgctgtgtgggcctccgacatattggacatcatgtacgcggactttttcgacaagtacgaagagtacaaggagtacattcgcagaaagcatttgcgcgagatcgaggctaagcagaaggccctaggactcacagtcggggccggacgaggtctgcaagctcgcgaccgtgccatgctttcggccaccaagtggaacgcttacttcaacaagtcccgtaaggatgagcgccagtcctgcatggacctgcagaccttcacgataaatcagccgcagccaaggaccgcgcccacctgtacacgcctagagcgctccacttcggatttgatacgggcagtggcagaagaggcgaatatcccggcaccgcctaatctcctgccaccccgcgactatgacgaggccttccgcaactcagactacgcttatccactcacggtggtaccggaccagttctcaatggcctaccgccagtttgagcccgccgagctcagagcctacccactggacacggcgctggacaagccgccgaccgatctgatggctcagctgctacaggcaaaatccgaagctgtaggcagcgatgaaatcaaaacgtccgccccggcccccaaggatctggggcaagagcagtccgccatcaaatccgtaacggtaacggcgcccgtccgacgcagcagaaggtccacacgccagcagacggacaaggttcgcacggctagcagctccagcacgtcctccgctcaatcggtctcatccgcgtccagcggcaacgggagcagcagtgatacggaaagcggcgatgaaagcgactttagcagcacatcgagctgcagcagttcgacgggtgcctcaagtggagcaggcagcgaggacgaggatgggaacgagtgctcatcgtcggtcaggctgtccacctgcggcgtctgtctgcgcagtcagcatcgcaatgctagggacatgccggaggctttcatccgctgttacacatgccgaaagcgcgtccatcccagctgcgttgatatgccaccgcgcatggtgggtcgcgtgaggaactacaattggcagtgcgccgggtgcaaatgctgcatcaagtgccgtagcagccaacgtccaggaaagatgctctattgcgagcagtgcgaccgaggctaccacatctactgcttgggcctcaggacagtcccagatgggcgctggagctgtgagcgctgctgtttctgcatgcgatgcggggccaccaagccggagggtctgccccaggtggccgctctgtcccaggcgtccggaggaccgtcggccaacggggatcgctcaaaggcagcgcgcaataagcgcttgaaatgggtgcacgagtaccgcatcgatcatgtgacgaagatccgggagcacgccgccatgttctgcgtaccatgtgcgcgaaacaagcccgccaagcggcagtcggcggcgggtgcggccggtgcggcagcagttactcctgtcttggaggccacttccgcgcaaacggatgacagtccgatgcccagtcccggcctgacaaccaacggaggacgcgccctttcgccaacggcggcactgagtccaaaggcagctgtgcccgtggcatcgctgccgcccgttcttgaagcgacgacggtgaccacaaatattgcgggaacgataggcagacggcaggcgggtaatgctgtcaatattacaacgatgcagtgcagcagcagcagcagcagcaacttcagcgggaacggagtcaccgaggacgcggcgaatgtcactgcaacgggaacggctacggcggccgcaggagcacccgctgccactccaataggcatagctccgccgcccgttgttgcctgagtgggggtcatacgttattgtgccaagcgtactctaacggacttatagtaagcgccggacgcgccgccccttttaccaagccgcctccaaagtggtcgtaaccacagagcacagccgccatcccaaaaaaagaaaataagaaaaaaaaaa

SEQ ID NO: 233 - DNA, 6733 bp, Drosophila melanogaster
aaaacggacgcatcagttcttccgaactagcaagcaattgtttaaacaaaatatagttgtgccagcaacaacaacaactgtgccaattgctagtttagcaaaggtgttgtaatatatcggccaaacaatccggcagcccaaaggcaggaacttctccattggacaaacgtgttttgcagccaaaggcacagcagcagcagcagcaaactaaacaaactgccagccaaaacaacaacgcacagaacaccgccagcaacaaaaagacacaacagcaacaacaaccccaacagggagcaacaacaaccacacagacaacaacagcagcagcagcagcagcaaccgcagcagcagcagcaacagcagcaaccacatcagcagcagcagcaacatcatccgcagcagcagtaccagcagcaacaactgaaaccgcaacaacaaccactgttgatgccagccaggcggatgctcttgccaaagtcgtggtaaaggacaaaaagaaggtcaatcaaaaggccagcgactttagcaacgttggtgactggccgacgctaattggcggaacttctggcagtggcaaagccaccagcaacgaacccaagcgcaacccaacgaaaaaacagcagtcagccaaaacagcagccgcagtagcagccagcagcaataccacttcaagtgaagttgccacagagtctaacgtcgcaggcacaaccagcagcagcaacagcaatcccagcagcagcaccaccaccacaaacaccactaccaacagccaagccacaactgcacctgttgccagcacgagtcatgatgccaaagcccagcgagacgctgagccagcggccaattctgctgcaggaactactggcaccgctgccgggcctgccctcaccaagaagatacccaagcacaagtggcgtccgctgcccatcgatctggctaagtccagtcgccccaagccgattggcggccggccaaatcggcgcttcagcgacgatattgccgaccagcgccgtccgccgcgcgtctaccacgaccgtcagcccggtgctggaggagcgggagtcgagtcgcggcatccacacgctggccggcatccgtacgggtcacgcccagcgactgctacgtccgagcgcgtggattcctggcgtagcagcagcagcaccaccaccgcagcgttcgatgagcagcgctctggagcagcgggtggtgccggggcagcgggaacgggagttgggtcagccacgcgcgggccgcgtcgctaccggacgccgtaccgtggcgggcggcaaggccggggcggattctcccgacagggaccaggtcgcccgacttatcgcataccacgccatctgctagcttcgggcgagtatgccaactatctgccggcggacgccgccggcgccgactcgcagtcctcgtatgtgctcatgggcacccactactttggcaacgtgcccgccgcctacatcgaattggacgctaacagcatcaaggaggccatcaagaagcaagttgaatactatttcagcgtcgataatcttaccggcgacttctttttgcgccgcaaaatggaccccgagggctatatcccagttactctgatcgcctcgttccatcgcgttctcgcactgaccaccgatgtggctgtgatcgtaaacgccattaaggaatcggataaactggagctctttgagggctataaggtgcgcaccaagacgacaccgaccacctggcccatcacggaagtgccggaggtcaacgaaggggaaccgaaggctattggcacactggagcaggagcagttggagcagaatgatggtcaggaaaagctggaggagcagactgaggcggattccccgccgcccattctcacatcggcgatggccacaaagccgctgaacagcattccgccgccgccaatgccgcgaaacccccagaatctggtgcccaaaatgttgcaggataagcaacagtcgagatcctcgaccattgcggctctaaactctgtgaatgcgatcagtgcgctgacccagcaagtggagggtggtgccgctgagctggctggacatttgagtggactggctgagagtgtgaagcccaagtcgacatcgacgccagacaagagaaatgctgcttcagcgggcaatggagctgggtcagcagctgctttggtggcggagccggagggcatatggaaagaggtaaagagacgctccaaaacaaatgctatcaaagaaaacgctactacaccaccacaacaacaacagccaccgctttcacaaacgctcaacaacaataacgataatgtcaaaacgaacaacacctcgtccaagtccaagtcctcgtccaacaacgccccatccaacgcctcatcatcagccactgtgtgtgtaaccacgaacaatgcttcctcagccaccaaagcaaccaccaaaaccacaaccacctccaccgccactaccaccacgaacaacaacattaaatctggcaatgctgcttactccaaaacccactccaaatcctcatccaaaacagctgctccgccatccgctcagtgccatgccgaaaaggaagaactagacttccagtttgacgaggagctaatggaccccctaccccctggaaccggacgcatcaacaacttcaccgaaaacttctccgacgacgacgaatccgactacgagtttgccgatcgtgacattaacaagctactgattgtggcccaagtgggccgcgcacctaagcacgagggctacgaccgcaccgccgactttacgtcgcgtacgaaaatcacccaggatctggagaacatcatcaacgatggactggttaactacgaagaggatctgtggaccaccaccaatgtggttgccgattacaagactgtcaatgtgatttcccaggcagacttcgaaaaactggctggtggtcgaaacaaatcggtgttgccgccgcaggtggtgccaccaccgccaccatttgaggaagatctggatgaaaccctggtgggtgacaccactctcaactccacgctgaacaacactctcaagtcccgacgtgcccgcttctatgctgctcccaactcgcactcgattgatccccgaacgccaagaaagaggaaactccgtcacaccgccaatcctccagtggaggcccacgtcggttggctgcttgacactgtggagcatcgtcctcgcaccacctcgatgggttcctcggcgggcacatcgcctaccgcctcgtcgtacggatcgttcggatcgtcggtgccacagtcgctgcccgtattccagcatccatcacatgctcttctcaaggagaacaacttcacccaacaggcctaccacaagtaccattcgcgctgcctcaaggagcgccggcgcttgggctacggtcagtcgcaggagatgaacaccctgtaccgcttctggtcgttcttcctgcgcgagaacttcaacaagagcatgtacaacgagttccgatcgttggcgctggaggatgccggcaatggtttccgctacggtcttgaatgcctcttccggttcttctcgtacggcttggagaagaagttcagaccgaatatctatcaggatttccaggacgagacgattgccgattatgaaacaggtcaactgtacggcctcgagaagttctgggccttcctgaaatactacaagaatggtgagaagttggaggtgcagcccaagctggccgagtacctgaagagcttcaagaacattgaggacttccgcgtggtggagccggagatcaacgagatgctgcaaggagtgggcagcctgaatccaggccgccagctcaatcgccaccgcagtgtgtcggagagcgatggcacagctgtaattgcggccggcggtcgtcgcctcaacacgaccatcaccaaccgcagcgactacgtgggcaggttgctgcagcaacagcaccaacaacagcagcagcagcagcatcaccagtatcagcagggatacggcggctacaatcagcagcaaaaccgcaggcgcacaggctccttcggcagcaccacagtgcgcattcgcagcggctccctgggcaacaagccgcaggtggccaatcgcaatcagggatcgcagcacgagttgcgacgcggcggcagcaattctggcctggcgccacacaagcgacagcagcaacagaagccgaagccaggagcaggatcacagacaggctcaacacgtgccaccacatcagcggcagctacagcaacaacagccgcatcagcagcaacatcaacagcagcgacgccagcggtaacggtatcttcggggtcatcgtcgtcgaagaagtagttacacgataatgcagagacactttttggattaggcttaagttaatatctaccgcttagttttcagggggcactcgcatttgatggctccacactcttttgtttattcattcttattattcttttgtagtattcgagtcaaacgtaaagtgggaagagttgttagcgtttagcataattaagtgaaatttttgaaatttgtttattgcaatttgcctagcgctcgttggtttagtagttacgattccaaatgtttgtttctcgcataccctcgacaaaaaactaaaacaatggttgcttacaaaatgctcaatgctcacacaaaacacacacacacacataccaattacacacagcggggtctgtctgctttgtaccagtgccaaccagccatgatcttggaaaataacgaaacgattgcccttattttttttttttgttctgttaattattctccttattttttatgcgatgcaaaaatcaaggcaaagattttcctacttagagcagcgttaatagttgacgtaatgccatgaactgttgtactatacgattaaagttaaagctaataaccataacaataacgataacgatataacctatgcaaatattacctaacgaaaactgaaaaccaatcaatcgaaattgatacgcaagcaacaacaaaaaccaaatgatcttaatgcaaataaattttgtaaattacgaaagaacatatatatatatatatatatatatataaacatatataactttatatgcaaaggtacactgaagccatgaaaacgcgtacataagaatatgattactaactataattatgattattttttgtgtgtgtgaccttagcgcaaatgtaaaatgtatttgtttaagaggcagcgagatcttgtaatccttaaacccaattgaggcaagcgggactcaagtgccagcgaattttagttatttaagcatttaccacaagccagtccagcgcaatcgcaatcgccagcggagtaggaataggaatccgacttggactcgggtccaccattatcacactgcactctccccagtctatatcaatccaatctatcgaattggttaaacccgaaaacctcagtaccccgccaagcatttagaagcatgtcaaaaccatttattttttacctttagttttgcacttgttaacttttaattcgagaaagctacgactacagaaaaacttagaaaaaaacaaaaaaaaaatttaaaatcacacaaaaattgtcaagtccaaaaaaaagtttaaaactttaaaaaaacgaaaaggcaaatcatgcaaacgaaaaaaaaaccattcagaaataatgaagtttgtttcgcatagtgaatagacctaaacttaaacatacgtgagaaatcaaatctaagcttaatacggataacaactatatatatctgcatatatccaaacacatatagagagactttagagcgtgactgcttttgaaaataccataactaaataagaggcaaacggtgaagttgcagaagtttgcaaaactctctcaaggtcctttagctcctcgattttgctcgctcatctagcctaagcaagcatacacacaacacacactacaaaccacacaaattcgaagagtgcaaagaacgtttcattaaatattattttgttatcattagatatctgtaaatatatttcccagcttctttttaaaatgtcgccttatcaattgatacaattttatccacacataaaaacaatcacatccgcattggccagacgcttctctatctgtatgagcttaacgatccgatctatcaatattatagatattacaaaatgagagagatgtccgacgagacaattcaatcggctgttgtgtaattatacatatgtagttctgccacaactattttgtttttcacatgaagtgttgactttagtttatgataacacacaaccaaccacacttggatcactgacttttatgtgcactttaagtttgcaacttttatatgaataatttaaacttaactctacgaatatgatacgatacacacagacctacgaaatgaacataatggaaactctattaaaagtaattttgtaagctacttaaatatgaaaaatgcgagaggaaaagtaagcaaaacgaaagaaatgattaatgtgaaaaacgtgatagtttaaaccataaagagtaatatttactactattattatattaataattaattatacgatgcatatatacatatatatatataaatatatatggatatgtatgtgtaaaacggaaaccacaaaaatttctaaactaacgtgaacaaaaaaagtaaaaaatttttttaaaatttccaacacaaaaaaatgttaaaaacaatgagtagaaaaactaaaacaaaaaaatgaataaaaaaaaa

SEQ ID NO: 234 - DNA, 14240 bp, Drosophila melanogaster
atgaataatgatgcgaaaaaccatgaaagcgatgacttgaatgtgcgctccacagcgtattttaaccaacaaaccacaaccaatcaaccgaaagcaccagcaaccagcaagaataacacaggctctggctctggatccaataataacaataacaacaccaatcaaaaccccaacagacagttgaatcataatttaccccgaatcgctgccgccagacaatcgatagccgccgctctattgaaaaacagcgggcggaagattctgacggccaagaatgagccactgacgacgacggagtcatcaggcgttttaaccaacacacctttacccagcaatagccgattgaaagttaacaacaacaacaacaccaataacactgccaagatgtctggaactagtagcagtcagtcctcggccacgcccacaccgcccacggccagcagcagcacaaccaccacaacaacaacgaacatcagcaccggaggcggtgggagtggcagcagtggcggtggcggtgggagtaccacggtcattgccaatcccgcatcggtaaccaacaccggagctggaagtgccgccaagttccgtgccgccgtggcctcggcgcccagcccagcactgcctgcaaccaacgctcctgcaaatgcaactgctgctgcggcaatagcagcaatcgcaactgctcctgcccccagtagtagctcctccagctcctcgtcctcgaagaagactagagcagcagtggccgccctgaagcgacaggtggccttgcaacagcagcagcctgttaccggtaatgcacccaacatgaccagcaaggattcggcgcatttgaaattcgccacaaccactctgctgatgggcgccgccgcagctgccgccgatagcaacgctggcgctgctctcggtggatcaggcgcaggaggatcaggatcatcatcatcagtaggagcggtaggcggggccagaatggccctgaatcccgccgttgatatggccaatgccgctgtcctgcttaagcaaaagctaaaggatgcggctgccgctgcctcggcctccgcctccaatcgctcagccacctcgtccatgtcgtcaaccgcctcctcgctgtcttcgtcggcgggcatcgtgaatgccatttcctcggcgctgcagaacatcatcacgccggatacggacaccgacaccgaattctatccccagcccgtcaccacagacctatccgaatcggaggaggagtccgtttcagaggacgatattccagaatcggatccggatagctgtccacacgagggtgaggtgcgcgaggatgaggacgaaacggaggaagagtcggaagactctgatgagtctgaaggcgaagaggaagaggaggatgaagaggagatagatgtgctacaggacaacgacgcggacgacgaggagatcgacgatgaggacgaggaagaggacgcgcccgaggtgagttcctttctcctggatgccaacaacaagcgttccagcaatatctccgctctgctcgaggccgcggccaatgagaaggctcctgtcctgcgccacgccactcacgccatcgacgagaccaagcaggcgctgacaaagatgcgctgcgccagcagtccccgcgataagaacagtggattctccagatccctagtggctgcctgcacggataatgatgtcaatacggtgaagcggctgctttgcaagggcaacgtgaacctgaacgacgccgccgcctccacggatgatggcgagtccctgctctcaatggcctgctctgcgggctactacgaattggctcaggttctcctggccatgtctgccgcccaggtggaggacaaagggcaaaaggactcaacgcctttaatggaagctgcatccgccggtcatttggacatcgtcaaactgctgctcaaccacaacgccgatgtgaacgcccactgtgccacgggcaacaccccgctcatgtttgcttgcgccggtggtcaggtggacgtggtgaaggtgctgctcaagcacggcgccaacgtcgaggagcagaacgagaacggacacactcccttgatggaagcagcttccgccggccacgtggaggtagccaaggtgctgcttgaacatggagccggcatcaacacccactcaaatgagttcaaggagagcgccctcactctagcctgctacaagggtcacctggatatggtgcgattcctgcttcaggcaggtgcagatcaggagcacaaaaccgacgaaatgcacactgccctaatggaggcttcaatggacggccatgtagaggttgctcgactgctgctggactccggtgcccaggtgaacatgcccacggactctttcgagtccccgctaacgttggcggcttgcggtggtcatgtggagttggcaacactcttgatcgagaggggagccaacatcgaggaggtgaacgacgagggctacaccccgctcatggaggccgctcgcgagggacacgaggagatggtagccctcttgctcagcaagggtgcaaacatcaatgccacgaccgaggagacccaggagacagctttgacgctggcctgctgcggtggcttcatggaggtggctgcattcctgatcaaggagggagctaatcttgagctgggtgcttccacgcccctaatggaagcctctcaggagggacacaccgatttggtaagcttcctgctgaagaagaaggcaaatgttcatgcagagacccagacgggggatactgccttgacgcatgcctgtgagaacggacacacagatgcggccggtgtgctgctatcgtatggagctgaactagagcacgagtccgagggtgggcgaacgccactaatgaaagcctgtcgtgccggacacctgtgcactgtcaagttcctcattcaaaagggcgctaatgtcaacaaacagaccaccagtaatgaccacactgccttgtcgttagcctgtgccggcggtcatcagtctgtggtggagctgctattaaaaaacaacgccgacccgttccacaagctgaaggacaacagcaccatgttaattgaagcctccaagggtggacacactcgtgtggtcgaactgcttttccgctatccgaacatttcgcctacggaaaacgcagcgtctgcgaatgttacccaggcagcaccaaccagcaaccaacctggtccaaatcagatgcgtcaaaagatcatgaagcagcagcttcagcatcagttgcagcagctgaacgctccccctggcttgcatgagttgtctgaggcggcacgtgcatccaatcaacaacatttccaccagcaacagttcagcagtgccggcaacggatcctccaacatcgtggcaatgggaactggcgactttttggatgccggagaactccaacttactgctactgcgggaatgagtgcgggagccggaaccagtaccacgggcagtgagactggtatggaggagtatggcgaagtcggaggaattgacctgactactcttggcgctcagcagcaagagggtcttattgcaaagtcgagattgttccatttgcagcagcagcagcaacaacagcagcagcagcaacaacagcagcagcagcagcaacaacaacaacagcagcagcaacaacaacaacagcagccacctgcagctggccagcaccagttagtgccatgtaagcacttcgacctggacatggagcacatcaattctctgcagccgccgcaaaaggcaccgcccgctccacctgtactcttccacaccgtttgccagcagcctgtaatgcaacagcagcagcagcagcttcagccaggtcagctcaagttgaaggccatgctacccaaccgcaatcgcgcgttgaaaaccgccgaggtagtggagtttattgactgcccggtggatcaacaacagcctggcgagcaggtgcgcacgcagcctttgggtgaggatggaaagactcctcagtttgcatgcgctggagaggatccacggttgcagcgccgtcgcggctttatgccggagctgaagaagggtgaactgccgccggagagcagcagcagtgacccaaacgagctagcccttaaaggagccgacaacaatcagcccgtaccgacagcactggacaatagcgcatgcgcccagattccagcgcgaaactctggcggagcaataacccattcctccgaagttctgcagagcacagctatcagcgacaggccaaaggtaaaggcaaccaacaagaacaaccgaaagcaagcggccgcagcagcagcagctgcagcagcagcggcggcggcagcagcagcggccgcccaacacgcccagcaagtgttgccgaacccaatggtctccatctataataacctgcatttgcagcacttgcagcatccgcatctccagtttcagcagcaacttcaactgcatcaccagcgagtagctggactggacaatgcagcggctgcagcagcagcagcggcttcatccgcgaacatggcctactctatttctccggcatctccacttccctcgcccactggcagcggcaactatgtcgatcagcagctgcaacagcagtccatggatgttgctctacagcgcaagacggccatggacgatttccgtggcatgttggagacggcggtaaatggtccaaggggcagaaaagacctggctcttaacacaccacagctgaacttcttcaaggacggctggcatatggtgggagtgcacaatttctttggtgatcagccaaagtcgcccactgaaacaccgcctgaaatggaggagactaccatgtcctcaccgaccgaagcagatcgtctcggatcggagcctcgggccgagatgaagaacttggccacgctctgctcggccgcagcagcagctgctgctgtggcagcggttaacaaggatcaggttgagattagttcggatcttgagagcgaatgcgaggatgatgcagaaggtggtgctggggcagattgcgaggaaaacacactgccgccggagccaattgaattggcggccgctctaagggaggatggcataattgtggaggaagaagaggatgacgaggaggaggatgatgatgatgaagagcaggataccaacagcggtgaggtcgacaagctaaactatgatgacgaagacgcggaggtggacaacgatggtgaagtagactacatcgacgaagacgaaggtggtggagaaggcgaagaagaagaagatgatgcagatgatgacgagttcttcttggacgagcctgatagcgaccaaggaactggcaacaataataacaattccaaaagcggcgccagttcgttgccattgaaacagcgcaaaatggccactcggttggaaaacctaatcctaaactcgcagacagtgtgcgacttcccgcctgaacttagcaactcggaactggttcatgtcctgccccaaataagcaatctcaaggcagcggccaacagcaacgcggctctgaacagcgtactccagcagcagttggcagcagcctccgcggcagcggcgcacgccaaagcgtctgtagtccaccagaagcagcagcatggagagggagatcagcaatgcgaagatgacggcagtgccagcgcaagtgagctatattcgggtttggagcactttgccaatgatggcgaaatggaggatatattccaggaattggcaagtagcctaaactatcccgagcttgccgagtttagcctcaatcagatgtgcaagggtcgatttgctggaaattgggcgcaatcttccggcaagtggactggtcaggagcagttggtgggtgtggtaaggtcgccgggtctcattaacccaggcgatgttccgcaggatgcccagcgacaggcgaatcttgtcctcctcgactatcccatgcagcaaaacatccaactagagcagcggctactcgatgctgaggaaatgcacctgcagcaacaccagcaaacaccgctctccttactgccctttacggatgagcagcagcagcagcttcatcaccaagctttgtccaatgcatccgattttcagcaacaccaacagcttgccctggaaaacgatccagaactaaagcagcagcttcagcagaactccaacgcgcgcataattaaagctgttgctgcccagcatcagcagcagcctccaaccaacttcgtttacaacgtggaaagcggcgacaagaatgctccgccagtgcaattgctcttccagttgccaccacacatggcgcaacatcaggcgcagcaacagcagggcgttggagagcctcttaccgaacagcaacagcagcagttacacgctgagcaggcgcatctctttcagcatcgaactggcggtcagcgtccgcccacccagagtgagttagagcaggtggctcaagagctattgcttcagcgaagcggccaggtgccggcaggagctcctgttgttggtgttcaggcaattccactcaagcaaaaacactttaacctgcatccgccgccgtgtccacccacctgtgtccagcatcaggtggccacgcagacgcatcctgcttctgttgtagtgccgcagcctgctgtaggatatacacaattcgctcttcaggcctctcagcaacagcaaatgcaacaaaacgagctctccatttggccgatggccacgcctactcccgcgcccagcagcggtgtaagctcgaccaagtcgatgcccggcggcattgccaaaaaggccattgacaagcagtcgcgcaaggaacgtcgttgcgtggtgcgccagacaccagcaggcattcaagagaacaccaaactccatctacagcctcaggtcgcaacagcccagcaacaatttctagtgcagaaccagttagcagttgcgaccaccgtgagtttggacaagactatcgaaatagattcagagacggaatccaaccacgacacggcgctaaccttggcttgtgccggcggtcatgaagagctggtggaactgttgatcaataggggagcaaacatcgagcaccgtgataagaagggattcacaccgcttatactagccgctaccgctggccacgacaaagtcgtggacattctgctcaagcacagcgctgagttggaggctcaatcagagcgtacgaaggatacaccgttgtccctggcatgttctggcggccgatacgaggtggtggaacttctgcttagcgttggtgccaacaaggagcaccgcaatgtatctgattacactccactgagcttggcagccagtgggggctatgtgaacatcattaaactgttgcttagccatggagcagagatcaattcgcgaacgggcagcaaactgggcatttcaccgcttatgctagccgctatgaatggtcatacgccggcggttaagttgcttttagatcagggatcggacataaatgcccagatcgagacgaatcgcaatacggccttgactttggcttgcttccagggcagacacgaggtcgtaagtctgctgcttgaccgacgggccaatgtggagcatcgagctaagacgggcctgaccccactcatggaagccgcgtcaggcggttacatagaggttggtcgcgttctgctggacaagggtgcggatgtgaatgctgctccggtgccgacgtccagggatacggctctaacaattgccgccgacaagggccatcaaaagttcgtggagctcctgctatctcgtaatgccagcgtagaggtaaaaaataagaagggtaactccccactctggctggctgcccatggtggtcacctgagtgtggttgagcttttgtacgaccataatgctgacattgactcacaggataatcgacgtgtttcctgtctgatggctgccttccgcaaggggcacaccaagattgtgaagtggatggtgcagtatgtgtcccagtttccctctgaccaggagatgattcgcttcattggtaccataagtgacaaggagctgatagacaagtgttttgactgcatgaagatcctgcgtagcgccaaagaggcccaggccgtcaaggccaataagaatgcttcgatccttttggaggagctggatttggagcggactcgcgaagagagccgcaaagctgccgccgcccgtcgtcgtgagcgcaagaagaagaagaagatggagaagaaagaggagaagcgccgtcaacaacagggcaatgggcctggcggagacgatatgcaaggcgatgacgatgacgccagtgacaaggatgatgattccgacaaggacgatgaagacgaggaggcagcgccggccgccgcccgcgaggagggagactctggcatcgatcagggctcgtgctccagcggagacaccaaaggtgcgcgcttcggtggcagtcagtccgctcaggctgcggaagcggcagccaattccgtgtccaccaacagtcagggaaagaagaacaagaagcaggcgaaaaacaaggtgttgatatcggtggaaccaactcaaccagtaatcacatcgaactccgtcctcaagggcgtctgtgcgaagaagcatcccgcagtggaagttgtaaagcaacctcctgccacacaacaggctgctcctcttaagcggcaactcgatgtaaagaaggaggaacctgcgctcaaaaagaaggaagagaaaaacagctcgtccagcagcagcagcaagcgtgagaaagagaatcttgcgcccaaggaggttgcactgccagccaagcagcagcccagtagctccagcaaactgcagagcagcgagtctgcgagcaacataaacagcagcaccgctaccaacaccagtagcgccaatactactcggaaggaagttgcaaagccagcgtcacaaactgcgagtgccaccactttgaatcctgcaaagcgcaccgaagtcgatggctggaaggaagtagtccgcaaaagtagcgcccagcagaccacagcggtgggagcgagtggagccccactgcctgtcacagccaccagttcggccaccagtgtgcaacatcatccgcaccaccacctagccaacagctccagcaacagctcaagctccctgaccaccagcactactacagcagcgtcttcggttcccgagatgacgtgcaagaaggtgcaagtgcccgtaaatgccatctccagggttattggacgaggtggaagcaacattaacgccattcgggccaccactggtgctcacatcgaggtggagaagcagggcaagaaccaatcagagcgttgcatcacgatcaagggcttaaccgatgctacaaaacaggcacatatgctcattttggcactaatcaaggatcccgatgtggacatattgcaaatgctgcccaggattaacagcagtattaagcaggcgtctagtggcggagcaagcaccccgatgtccgtgggaacttgggacaatcgcaccgctgccggtgtgaatgcgtataccttttcttctgccgcgtccaccacctccacatcctccagctcgtcagctagctctactacaccagcgggagcttcgtacagcaatgcgcacaagcagcaccaacagcagccgcagtcagtgaagggcccaagtggacggtcatcaacgtcggtcaagtctaatggcagtagcaccaaggtatcggcttcgagtggatcgggttcccggagcggcagggctggcagtagctatcttgcccaacagcagcctggtcgcagctctggaggtggctcttcaaatggcgtgatcaagagcaagtcagaaagctcttccaaatccctgccagctgcacaaaagagcagtaccactttgggtaaatcatcgactgtgtcaccgggtgcacagaatttcgcaaaggcagcggctattggacagtcctcgcccaaaaaggctgagggtggtgctacatctgcggtggtcacctctgccggtggacgcagcagtggcgtggtggctccatttggacgtggcaagcctgtagctggccaaggaggacctgcagcaacggcggcttccaacgttgcccagctgggaagtgtgagtggcaacagcaacatattggctggaccaattggcacctttaatgtagcggatgtggctgctgtgaatgcagccgcggcagcaggagcagcagcagctaccaacagcaatgtgaaacccattgctcccattgcaccgcccagtaagcgagttggatctcccacccaagtccagcaacagcatcaaacacagcagcagcaacaacagcaactaccccagcccgcaccagttcctggcccacagccacaacaacagccgcttcagcagcagcaacaacaacaagctcctcagcagcagccacaacagccaaaccagcaacagcaaccacagacgtcccagcaaaatctcgtgatcaatacaaacctactgaacgatctgatggccgccagtgcagcaaacaccaccagcgatagcttcagtgcccagctagcagccaagttgtctagcgcatattccctgttcagtgactaccagcagtcgcagtggggcaagttgggtgatccaggcatcggcggtggagcaggagctgttggcgatggtctgccgcaagcggatgcttccaaggcaccaggatacaatcgcaacatccttagctcgcccgttggcagttccaaggcctcgtcgaatcactccacctcgcctcctgtgggtaatgtgatccaacagcagcagcagcagcaaccgcaatctagccaacaagctctcaacattatcaccagtggaccaggagggcctgctacagcaccagccagatcaccgatggtgtccgccaacgagggcaatcccgctgtgggtcaaccctccatgaatggaacccaaggattgggtgagacggctcctgctcattcaccaggcgttatcaaaccgcccacggccacagttcccatccagcgtcatgtgcccatgccgatctctgcgccggaggccggagcaccgcccacatttggagcgattggttccaacccagctagcggtaacaattctgcggctgcccaagccgcagctgccgccgccgcctcggcgatgatcgatcgtcagcagcagaatttgcagaatctgcagactttgcaaaatttgcaaaggatggtgggagcctcgcagcagcagcagccacaacagcagctgaactatccaatggaccccacatcgtcgttcatcgtggatgctaataacgtactgcgcctgaatccacgcgtcatctttccgcaaggcaacaccaagccaccgcagccaccgccgcagggtggaacgcagtcgaatgtgtttggaggaaatccaggcagacaaccacctggaacgggtgccagacagccaggaggagcagctgcacagcgttggtatggcggcactctggagtatccttcatacacgggccgtgatatgctgcacctggagaatggtgccggcggaatggcgggtatgggctcaccatctgccatgtcgcccaaccacgacgacattcgcaagatgccgcgccccataggcactgagcgagccgcatcatggaagtacaacaactttaacgttggaggcccgtcacttaacatggaagatgctctagccagtgtgttgcccccatgggcacatgagcttaaggctcagcctccaggtttgcagcagccgcctcctccgccgcagtcgcagcagcaacagcaacaaccgctcaactggctaaagcagcagccgcagcagcagcagtacagggcctacaacaacggaccctatccgcagcagcagcagcagcatgagccaatgaatatgcccatggactaccacaacatgcaggcacctccaaatatgagccagcagcagcagcagcacgtcaacttgatgccctcctacggctaccagcattttgtgggcgctcctggagccgttgacatctccgcacatatgccggacaagatggaggtgtgggatcaccacgataaacacatgccctggaccaactataccaccaactggtccaactgatgtgccagcgaaactcagatggaggatctcttcgatgcctgaattgagcagctcgtactgagagaacttctgcaaacaaattaccaggacctagcagaaacgtcaacatcaatagcatctcactgatttgaacatgcaaagcgaaataatattttttgaatttgtacaattactattcggattctcggcttcttctccgcaatcctaaatcttctaactgcctgtcaactttcgtggaaaccaactaacagcaacagctagatggaaaattgctacatggctttgttctttagtttaacaatataaaaacgtttgaattcgggtaattatttaacttcgcaggcaatacgtgaattttaaccgcaaacatataaacataataacgctaaagaaatgcaaaatgataaaaaaaagcaaaatgctagaagaaaacatgtttgaaactggtgcccaggcaactgggtccaatatatattatttatttttaaatgtattgatattttttgaagaagcatgaagttagtggtagctttttgtgtgttgagctatagggaaaacgaaacgaaaagtaaatcttctacacacacacacacacatatatacaagcactaacccctctcccgcacacaacacacacacaaacccacacacccgcatatacacaaatacatttacgttaggataaaagtcagtcttatgaatgaaacattaaattgaaatgtttagcgccagctaaagttaaaatacacacaaacttttattacaacacttatacataaatacatctatatatatatttaataacattaataaaggcaacaaatgaatgtcgaaactgtaaattcaaggcgcgcactattctctatatccccagtttttccccgataaaatccaaaccccaaactaaactaaactaaacaacaagaagctaacaaactggaaactagaacaaagctatgaaaacgcatatgcatacgctatgaatcgcaaaaaaaagtacgaaacgaaaaaccacagccgacagataattacttaattcaacatataacgtatacataccgcaaactactcccaaactcaaagatactaccaaaccaaccaatacgaacgaaacatccgaggcggagctgctacagagcttggtgttctttgccagaagtgaatggtgtggtcgataccccgaaaaatgtagttagtagaaattgaaattgcttaattaactaagtaaaacatcaataacataatggtcgagtaacgttttaatattccatttacgagaactaaacgatatacgatacgatgatgatgattaagatgacgaggcgacgaagcggcgcgcttgcttgccatctttgatgcttttccgacactgctcatagacgtacataaaatatatacctatctaaaatatatactagcgaatagcatatatgagatacacgaacttttatttcgatcacccgatgaacgcgagcggaacgtgaaactaacgaagatatgtaaaaacacttgataaaccttaacaaaaacccttcttgcctgatcctccagtcggcacgagtgaaatccgaagcccgggacaccagtcaaaggtgtgggggggtcgtcatgcaattgctttgtaaaattctagaggagaacgataatgttgcttgagatgatgatatataatgcttagagaacccacgcataatctaatgacacacagaaacacaacaaattcgatggttattgcaagatatactttatcgatgataatgatgaatatgaaaatacgaaataaatgataatataagtgaagcatgaaactactttttttctatttttcaatgttttagctgcaagcaaataatgtaatgagaatgtggagatgtttgtttaagttatttgatacaacaaattacgagaaatatatataccacatacacaaacacctaaacccaaacacatgcccgatatgcccgacaggaagtttattcgattttgttgattaacaaaaagatacaaccgaatatctgaggacatacagccgttatgagatgattgattatgagatccttgattgaaacgcaaacaaaacgatgggaataaaaatgaaaaatacaaaagcatactgaataaatatagaatttttttcaagcgaaagaaattaaattcacatagatttattaatttaaaaattaatataaatatacttcaaatatgaaaagtatgaaaacaaaaaaaaaaaatgc

SEQ ID NO: 235 - DNA, 1730 bp, Drosophila melanogaster
ctgttatggactatacacgtgaaattttgaccttccagttcggaacgtacgcgaattacgtgggcacacacttctggaaccagcaggaggccaactttaggtacggagacgaaagcgaacaggtggccgaggagcagctgcccaacaatgatattttgtaccgtgaagggcgcaacgacctcaatcgtaccacctacacgccccgcctgctgtccgtggatttgtccgggaccctgggacatctgccggtgaccggcgagctgtacggcaattttgtgcagcgtgatgaggagttgctgcccctgagcaccggagaggaattggaacaggttcgcaagcgggcagaggagagcggcgtatgctcaccggagcagctggaagtgcaggagcagtcgaaggcctccatttccgaatatcagcgggatctgctcaagaatgctgtggtgcccgagaagaactatcagctggcagcgacggcaaacagttgggtggacttcctttacgccaggtatcacccgagaaccttgaatgtcttgccggggctgatccgagatccgactgcccaagccctgggtacctactctgccggaacagaaatgtggcaggaagtctccttcaacgaggagttctgcgatcgtatccgtttgtatgtagaggagtgcgatggcctgcagggcttccacgtgctgttcgacattgacgatggcttcggcggactggctgggaagtgcctggagcacctcaacgatgagtacagccgggcgagtttcgcgctgccacttcactatcccaggatcactagttatccccaagcggatacccgcctgtcgcacagcattcgggtggtaaacaatgtgttgggctaccaccaactcagcgagcaggctttgatgttcacgccgctatccacgctggagaccatctggcgaaacaataatctgaagtcgcgcagtctgccgggactccagtgggagacggataacctctaccagacatcagcgctgctggccgcctttttcgacacggccaccttgagttaccgcctgcggcaaacgccagaatctttgctacgcttttgcgaatgcgtcactccagcgggcagaaagatgaccgccgctggattggctctgccatttgggctgagggagggtcaggatctgatagagtttctagaccagagtggcgaccacgcgctgctcacacaactcacaccgggctgtgagcctggcacatcctacgtggtgcaatcagtgacggctcgtggcattcccgcggaacgtttgaaacggcccagggagctggccggcgatcaacttcggatggctgcctatagctgcgatagtatatcccatatgctgcagctatactaccagtgcacctatcatggaagtgttacaaatgcggcagccacaccactgccactaaagacacagctaccttttccttatgaaatgtttgcagccggtatatcacgcgatggctaccgcttgcctgagggggcggaacgcgagacgggtagtcgtgtggattcggcacccatgctggccgccgtacagaactccaccaagctgggcgagcatctggacaatgtgcacgcccaatcgcatcgagtgcagctggccaagttgcaagcgtactctaattctggattggagcgggatgagtacgatacggcgctggatcagctgcttgagttccgcgacctttacgcagactcgcagtatctatag

SEQ ID NO: 236 - DNA, 3785 bp, Drosophila melanogaster
catacatacccaagtaggcattgtgtcaccacctatgctgtgtacgtataatacgtttatctgctttgttccattacattcagtttttcgattttgacgacggttgtcaacgagttgtagcaagcacattttaataaagcgaaaggaaataataatatttaaaaaatggaaagtgcggggaaacaagataataacgccacgcaacagttgccgcagcgacagcagcggggaaaccagcaggccaacaaaaatctcggcaagcataatgcacaaaaacaaaatgattccgcggacggaggcccggctgaaaagaagcaacgattcggtggtccaaatgcccagaatcaaaaccagaaccagaatcaaaatggtggtgtaacgggcggtggtggtgcagttggtggccccaatcaaaataagaattttggaaacaacaagggtgggttcgttggaaaccgcaatcgcaacaataatcgcgctggaaaccaaaaccggacttttccaggcaacaacaatccaaatcaaaagcccaataacgaaacatcaaaggcggacggccctaatgcacttgctaagaacaatgaaccggcaactgcagctgctggccaaaatcaagcgaatcagaacgccaacaagggccaaaatcaacggcaaggacaaaaccaaaatcaaaatcaagtccatggtcaaggaaatcaaggaggaccaggaaatcaagggggagcaggcaatcaaggaggccaaggaaatcaaggaggagccggaaatcagggaaatggtcaaggattcagaggtcgcaatgctggtaacaatcaaggtggcggtttctccggaggtccgcagaaccagcagcgtgacaaccgaaaccggagtggtccacgccctggcggaggtgctggtggcgcgatgaacagcaccaatatgggtggtggtggtggtggcggtggaggcggtggtccgcgcggcggtgaagacttcttcattacccagcggttacgcagcatttctgggcccacctttgaactggaaccggtggaagtgcccacggagacgaagttctctggacgaaatcgtctctatgtgggcaacctgaccaatgacatcaccgacgatgagctgcgcgagatgttcaagccatatggcgagattagcgagatcttctcgaacctggataagaactttacattcctaaaggtcgactatcatcccaatgccgagaaggctaaacgcgccctggacggatcgatgcgaaagggtcgccagttgcgtgtacgattcgcaccgaatgccaccattttgcgggtgagcaatctcacaccgttcgtttccaacgagctgctgtacaagtctttcgaaatctttggtcccatcgagagggccagcatcaccgtcgacgatcgtggcaagcatatgggcgagggcatagttgagtttgccaaaaagtcatcggccagcgcctgtctgcggatgtgcaatgagaagtgcttcttcctgactgcttcccttcgaccgtgtctggttgatccgatggaggtgaatgacgataccgacggactgccggagaaggcgttcaacaaaaagatgcccgacttcaaccaggagcgtagcattggtccgcgcttcgccgatcccaattcgtttgagcacgagtacggttcgcgctggaagcagctgcacaatttgttcaaaaccaagcaggacgcgctcaaacgcgaactgaaaatggaggaggacaagttggaggctcagatggagtatgcacgctatgagcaagaaactgaactgttgcgtcaagagctgcgaaaacgcgaagttgacaacgagcgcaagaaattggagtgggagatgcgcgagaagcaggccgaggagatgcgcaagcgcgaggaggagaccatgcgacgtcatcagaccgagatgcagagccacatgaatcgccaggaggaggacatgctccgtcggcagcaggagacactgttcatgaaggcacagcagctcaattcgttgctggatcagcaggagggatttggtggcggcggcggcggtaacaactccacttttgacaacttcgctggcaatagcaattcgccattcgaggtttttagaggcaataacaataacaattccacaatgattggaaacaatgctgcccccaacacacaggactccttcgcttttgaatttggggttaacaatatgaaccaaggcggcaatcaacgtggaaataatggcggaggaaataatgtcccatggggacgtcgacgtttttagacactggatcgatcgaacaatatacatacatataaggatgagatttgacgtactctcaaatatttgattgcgtttcacattttaacttggctcgctagtgcgcgcgatcagaatgaacttgcttaaaaggatccctttttatcgcatgcacccaaatatgttttgatttaatatttggtcaattattatcaatcgtctatcgatcctaaaattttaagagtaatgacacgcaaaggatgaaccttacaaaaataatagtatacaatctgaatcccaaaatgaatgtgcaacaatgctgcaccgaaaagaaaaacgaaatcattgcgtacatatacttaatcataacgataatttaagattatgtatgcggcgaactacattctccagtaatttaattcttttttgtccaccatacaaattaaatatacataaagatatattccaaatcgatttatttgaacatgaaaaacgcaatattaattcaaaagaaaagaaaagaaaaagaaagttaagaacacttcgagaatctggtgagtattccggatgagcgcatggacttgatctggatcttggtctggatatctcatctcattcgatgtccactaatggatgatccttctgttgtgcagaactattctaagctttcccactattttgttaatgattaacaaataaaatgattaacaacttttttttctggctgtagtcgaatcgcaactcaatttttttttttattcagtctaaataatgtttttatttttcttcatatgttttagtatctatttcaagtatttatcggaagaattaaattaatttcggtaatatgacatgtgtaaaattttgtgtaattttcattttttttttttacattttgtcttttacccctttgttttttgtaaaatattcttgctattttgtatttgatagtaatatttaacggaattgcatatcttatctaatatggaattttcgggaaatgatattcgattttgggaaaaatgcaagggaaaatcattcaaacgctagtgtattttggatatacatttctcaccgattttggatattatctcaagtacaacattatttaggatagattttgatagttttacgccgttttcttgcaatgaaaccgacaatctcagactttgaccaaaatttgatgaataatactttgtgttttatacccgtatacctttcatgttgcataaatatacattggcatacctacaaagcaacaaatttaaatgtagttgtaattaattgtcatgctaataatttaattatacttatataaatatatatatattagtatgttcaaaatactactactttaatcaaacaaatatggcactttgaaagcaaacataaaatatttacattttgatcagttctgggtgttggcaccgaaaattaattttagtaaattaataaacaattcgaagtgtatagaatatctttaatttttttcaattttgatgcaaatgaaaaataaacggaaattgacttccaaatgcgaa

SEQ ID NO: 237 - DNA, 591 bp, Drosophila melanogaster
atgtatgtgtataatctgcttttcgttgtaatagtttttagctattgtgcaaaatcctttaattatacaagctgcgatcacgcaaagcagccaaagtttttgagctcatgctgtgatgttcaaaaaaacgacaaggccatcaattcgtgtcgcaagtccttgctgggcaataattcaaccaattcgaatggggaagtgcgcaatcttaagtcggataaagtggctttgcatgcatgtattgcggagtgctccttcaggaccaatggattcttgttgagcaatggcactgttaatacccaggcattgcagaagagctatcagcaacgctacaaaaacgatccgaatatgtcgcaactgatgttgaagagcctcaatagttgcacggactacgctaggaagcgggtgcaggagttccaatggatgcccaagaagggcgactgcgacttctatcctgccaccttgctggcctgcgtcatggaaaaggtctacatcaactgcccgaccagcaaatggaaaaacaccagcgattgcacagcgatgtggaaatatttggttgcctgtgatgatgtggccagtaataagaagaaatag

SEQ ID NO: 238 - DNA, 2638 bp, Drosophila melanogaster
taatagttcaatactaagcttaacttgaatataattttctataagaaagtttttcaattaggttattgagctccacccattttgtactactaatgacgtcgaactatttgtactactagtgacgtcacaatgtgcaatatttgctccacagtcgtgtttttccaaggaaggcacacaaatagtgttgtaagcagaccaaagtcaagccgaccggcttgcaaaaatcgcgttgcccgcgcagttttctttttgttgatatcgggtgctgaaccaagcgacagtggctctgcaaaacaagcaaaagaaaaagctggaaatctgtggaagtaaatacaagtcatttttgagaacctatcagtccgagcagtagaactccataatgccgcgtgtcaaggccgtgaaaaaacaagcagaggcgttggcatctgaacccactgaccccactccaaatgccaatgggaatggagtcgacgaaaacgcagactctgccgctgaggaactcaaggtgccggcaaaaggaaagccgcgcgcgaggaaagccaccaagacggctgtatctgcggaaaactccgaggaagtcgagccacaaaaggcgcccactgcagccgcgcgtggcaagaagaagcagccgaaggatacagacgaaaacggccagatggaggtggtggccaagccgaagggacgcgccaagaaggcaactgcagaagcagaaccagaacccaaagtcgatctaccagctggaaaggcaactaagccacgtgccaaaaaagagcccactcctgctcctgacgaagtgacgtcttcaccgcctaagggacgcgctaaggctgagaaaccaacgaatgcccaggccaaaggacggaagcgaaaggagctgccggcagaagcaaatggaggggccgaggaagcagcagagccgccgaaacaacgggcaagaaaggaagcagtaccaacgttaaaggagcaagctgaaccagggacaataagcaaagagaaggtgcagaaagctgagacagctgccaagcgggcacgcggaaccaagcgtttggcagattctgagatcgcagctgctctcgatgagccggaagtggatgaggtgccgccaaaggctgctagcaagcgagcaaagaagggaaagatggttgagccatcgcccgagactgtaggagattttcaatcagtacaagaagaagtggaatcgcctccaaaaactgcagctgcacccaagaaacgcgccaagaaaacaaccaatggtgagactgcggtagaacttgagccaaagaccaaggcaaagcccactaaacagcgcgctaagaaggaaggcaaggagccagcacccgggaagaagcagaagaaatccgccgataaggaaaacggtgtagttgaagaagaagccaagccctctactgaaaccaagccagctaaaggacggaaaaaggctccagtcaaggcagaggatgtcgaagatattgaggaggcagcagaggaaagtaaaccagctcgaggccgaaaaaaggcggctgcgaaggctgaagaacccgatgtcgatgaggagagtggatcgaaaaccaccaaaaaagccaagaaggccgagaccaaaaccactgtaacattggataaagacgcttttgccttgccagcagacaaagaattcaacttgaaaatctgcagctggaacgtggccggtctgagggcctggttgaaaaaggatggtctgcagttgattgacctcgaggaaccagacattttctgcctgcaggaaaccaagtgcgcaaacgatcagttgccagaggaggtgacccgactgccgggatatcatccctattggctgtgcatgccaggaggctatgccggcgtcgctatttacagcaagataatgcccatacacgtggaatacggcattggcaatgaggagttcgacgatgtcgggcgcatgattacggctgagtacgaaaagttttacttgatcaatgtgtacgtgccgaattcaggccgaaagctggttaacttggagccccgcatgcgctgggaaaagctcttccaggcgtacgtgaagaaactggacgctctaaaaccggtggtcatctgcggcgacatgaacgtttcccatatgcccattgatctggaaaacccgaagaataacaccaagaatgccggcttcacccaggaggagcgtgacaaaatgacagagctgctgggcctcggctttgtggacacgtttaggcatttatatcccgatcgcaagggcgcctacaccttctggacatacatggccaatgcgcgagcacgcaacgttggatggcgtctggactattgtctcgtctcggagagattcgtgcccaaggtggtggagcacgagatacgcagccaatgccttggaagcgaccactgcccgatcacaatattcttcaatatataagatgtacacttcgtttgtgtttaaatgtacttctggattcgtcattattactttgtttcctctccatatatggtttttattgtatttgattatccatcgctgtagaaattgtacgtccctatctaatcatttcaaaatgccattactctattacattctgtcatagatccaccatcaaaattcgtatttttttaataaagtgagctactgccccacgtt

SEQ ID NO: 239 - DNA, 4938 bp, Drosophila melanogaster
aaaaaatggtgtgaaacggcgacggagaacgcggcgtgcaactgttggaagccactgcttggtcctcgttttggtcccgggttctggtcctcctattgatctccatctccgcccggccaccagctcgaaagcgcacctacacatcatagtttccatagacagtcccagttccacatccactcccccgccagccagccaacaacaacaaaaacaacaacagcaagagaaacaactcagaagtcgaaaggaatctgggaactcctgcgactcccccgcgcaatgggcaccatctcatccgtgctgcagtggtcgtgcaccaaatgtaacactatcaatcccacggagtcgctcaagtgcttcaattgcggcaccgtccgcaaggtgttcccccaacaacagcagcagcagcatcgcagcagcagcatcaccgcctcctggacagctgatgatgcactggagcaggagcaggcggagaaggggcaggagagggacaaggagaagggcagggcggcggttgccaggagcgagtacaagcatgtgtacaagtccctgctgcgcggatgcttgaaaagaccacagcggaacagccagaatctgcccgccaactgcgtggattgcgaggacacgcgcaagtacatcaagagctctattgagctgtaccgccacttctcgaatccggccctgaatcggcggtgggtgtgccacgcctgcggcacggacaacagctcggtcacctggcactgcctcatctgcgacacggtcagctatctggcgcccatttacaaggacgccatcgccgccgaccgaggccaggatctggctggcagcctgggcaatcgcggcgagctgctggcggcggaccattcacatccacatcatcatcaccactacctccaccaggaactggaggagcagcatcagcatcagttacattcccagcacttgcataagcgccacctcaaaggtagatctgcatccggatcgggatccggaccgggctcgggttctggactgcgccgcacccagagcctgagcaccgctatcgacaagagcgcttccgggcgcagctgccacatttgctatgcgaacaaccagagcaaggacatcttcaatctgccgcagatcaagccggcgccgcagctgacagggattccccccgtggccgcctgcagcaactcccgttttgccatcgccaacgacactttttgcaggcgcaaacagaacaacaataacaagaaccagaatcacaaggtggttcgcgagagcggtgccaagcggaagtacaactttaccatcaccacgctctctcggtcggcggccaaggatgccggccatggccaaatgaagccactgcgtcaggtcgttaatctaaatctgaatctacagcaggagccgcagcagaagtcaccggctaatccgcagcagctgcagcggaaaacccagcgggagccagcagcatatgcatgatccagggagcagcagccgcctatcaggagccgcatccgcagcagcagggaccgcgtcagctggagctatagctgcagccgtaggagcagctgctgcctcgcggcacgacaataagacacagcttggcaacggcagccgcagtaagatgtggatatgcatcaaatgttcctatgcctacaaccgactctggctccagacttgcgagatgtgcgaggccaaagccgaacagcagcaacagcagttgcagctgcaacagcagcagcagcagcagcagcagcaccaccaccaccacttgcagcagcaacaggcagaagcaccccgcgacgagccatggacctgcaagaagtgcaccctggttaactactcgacagcaatggcctgcgtggtgtgcggcggctccaagctgaaaagcatctcttccatcgaggacatgacgttgcgaaagggcgagttctggacctgcagccactgtacgctcaagaactcgctgcactcgccggtctgcagtgcctgcaagtcccaccgccagccgcagctctcgatggccatggaggcggtacgggagcgaccggatggtcagtcgtacgaggagcaggatgctgcagccgtcgggggcggaggaggcagtgcccaccaatcgggcgccaatgaggtcaaggcgcctacagccttgaacctaccgctaacttcggtggcgttgcccatgcccatgctgcagcttccaacgtcaacagcggctggtctgcgcggctcacgcagtccctcgcccaggatgcagctgctgccatcactccagcagcagaggaactccagctcatcgggcgctatacctaaacgtcacagcaccggcggctccattgtgccacggaacatttccatcgctggtctggccaattacaatttgcagcagggccagggagtcggctccgcatcggtagtgtctgcttctggagctggatctggagctggagctgtcggagccagtaccagcacaaagaagtggcagtgtcccgcgtgcacgtacgataactgtgccgcttccgtcgtttgtgacatctgctcgagtccgcgcggcctggcgagcgcagttttgggcgaggcgttgggcagaaagtccgttcgagttgccctcacaccggcagatattcggcaggagagcaagctgatggagaaccttcgccagctggaggagaccgaagcgttgaccaagtggcaaaacatcatacagtactgtcgcgacaatagcgagcttttcgtggacgattcgtttccgccggcgccgaagagtctgtactacaatccggcgagcggagcaggcgagggaaatcctgtggtgcagtggcgacggccgcacgagattaactgcgacggcggagcgtatccaccgtgggctgtgttccgcaccccgctgccctcggacatctgccagggcgtcttgggcaactgctggctactcagtgcgctggcggtgctggcggagcgcgaagatctggtcaaggaggtgctggtcacgaaggagatatgtggccagggcgcataccaggtgcgcctctgcaaagacggcaagtggacgacggtgctggtggatgatctgctgccatgcgacaagcgtggccatctggtttattcgcaggccaagcgcaagcagctatgggtgccgctgatcgagaaggctgtggccaagatccacggctgctacgaggcgctggtctcgggccgggcgatcgagggactggccacgctgacaggagcgccttgcgagagcattccactacaggccagtagcttgcccatgcccagcgaggacgaactggacaaggacctgatatgggcccagctgctgagctctcgatgcgtacgattcctcatgggcgccagctgtggcggtggcaacatgaaggtggacgaggaggagtaccagcagaaggggctgcgcccgcgacacgcctactcggtgctggacgtgaaggacatccagggacatcgcctgctcaagctacgcaatccgtggggtcactattcgtggcgtggcgattggtcggatgactcctcgctgtggacggacgatcttcgggatgctctgatgccgcacggcgccagcgagggcgtcttctggatctcgttcgaggatgtgcttaactacttcgactgcatcgatatctgcaaggtgcgctccggctggaacgaggtgcgtctgcaggggacattgcagcccctgtgctccatctcctgtgtgctgctcaccgtgctggagccgacggaggcggagtttaccctattccaggaggggcagcgcaactcggagaagtcgcagcgatcgcagctggacctgtgcgttgtgatattccgcacccggtctccggcggcgccggaaatcggtcgattagtggagcacagcaagcgtcaggtgcgaggctttgtgggatgccacaagatgctggagcgggacatttacctgcttgtgtgtctggccttcaaccattggcacacgggcatcgaggatccccaccagtatcctcaatgcatcctagcgatacacagctccaagcgtctgctggtggagcagataagtccctcgccgcatctcctggccgacgctatcattagcctgaccctaaccaagggacagcggcacgaggggcgcgaggggatgaccgcctactatctgaccaagggctgggcgggtctggttgtgatggtggaaaatagacatgagaataagtggatccatgtgaaatgtgattgccaggagagctacaatgtggtgtcgacacgcggcgaactcaagacagtggactctgtgcccccgctgcagagacaagtaatcatcgttctcacccaactagagggcagtggcggcttcagcatcgcccaccggctgacccatcgtctggcgaattcccgcggcctgcacgactgggggccacccggcgccacccactgcccgcccatcgagaatgtccatggactgcacgctccgcggctaatcacctagaatgggatagggatagggatggatggcagtgacgcaatttcgatgctaccccgcgatatgtcgctgttcgaatcctgatttgcatgcgtctcctctcaattctacccgtcttctagtcgatgttctgttaacgaatcacacattacagcgaaaaacccaaagttgaaaccaatcagcatgcgaaacaattcatatatatgtgtatagagccgtgcagatatgatatatgtatgtgtttatgcactaaggcgtatcggaaagtgggagcagatccccggtggggatacggcagagcccagaagccccagtccggagtcctaaggctaaggctcggcacgattcgcttgagatccaatgatctgtgttttgattagagcggctatgattgtggattatatagatatgtattgtgaatttaagtgcatccaatattaatatgtgtattgttttaaaaataaagactacaagttataaaa

SEQ ID NO: 240 - DNA, 3628 bp, Drosophila melanogaster
gctttcgctccaactctagagacgcggcagtcgttttttagccactatagggaattgttcgaatgcggagcaattttcaaatgcgcaaccagttgaattcttttgcaagtgcactttgttttcaaggattcgtttaactgataggatttcctttggtcgagactctagtttttttttctaaattctcagtgcgtgtgcgggtgtgcatgtgcgttccgtctccctcgcactgcgtcgtgtgtgtaatgtttgtgtgtgcgtgaagccagcgcgatttaaaaataaaacggcaaatacataataaaaaatatcgaagagcaacagcggcaggcgtaccaatacaaactaaccgataccagccagccgtgtgtgtttacacagtgttgtgcgttggtgtttgtgtaccaaaggtccgaacaaataacgcccaacactaccgatcagttagagcgcgtggccctaaagttcaacgaagatctgcagcaaaagcttctatccacgcgcaccgccagcgaccaggccctcaagttccgggtggtggagctttgcgccctcatccaacgcatctccgccgttgagctgtacacgcatctgcgcagcggtctacaaaaagagttgcagttggtcaccgagaagagcgtggctgcaaccgcaggccaatcaatgccgctaaatccctacaacatgaacaacacgcccatggttaccgggtacatggtggaccccagtgatcttctggcggtgtccaacagctgcaatcctccagttgttcagggcataggacctatccacaatgtgcaaaatacaggcattgcctccccagccctcggtatggtcacacccaaggtggagctgtacgaggtgcaacatcagatcatgcagtccctcaatgagtttggcaactgtgccaatgccttgaagctgcttgcccaaaactacagttacatgctaaactccacatcctcgccgaacgcagaagctgcctacagaagtcttatcgatgaaaaggcggccatcgtactcacaatgcgtcgcagctttatgtactacgaatcgctgcacgagatggtcatacacgagctcaagaactggcgccaccaacaagcgcaagccggaaacggagctccctttaatgagggctccctggatgatatccagcgctgctttgagatgctcgagagctttatcgcacacatgctggctgccgttaaggagctgatgcgcgtacgtctggtcaccgaagagccggagctcacacatctgcttgaacaggtgcagaacgcgcagaagaacctggtatgctctgcctttatcgtcgacaaacagcccccgcaagtgatgaagaccaacacacgcttcgcagcgtctgtgcgttggctaatcggttctcagctgggcattcacaacaatccacccacagtcgagtgcatcataatgtcagagatccagtcgcaacggttcgttacgcgcaatacacagatggataatagtagcctatccggtcaatcatcgggcgagattcaaaacgcctctagcactatggagtatcagcaaaacaaccatgttttctccgccagcttccgaaacatgcagctgaagaagatcaagcgggcagaaaagaagggcactgagagcgtgatggacgagaagttcgccctgttcttctacaccaccaccaccgtgaacgatttccagatccgtgtgtggaccctgtccttaccggtggtggttattgtgcacggcaaccaggagccccagtcttgggctaccattacttgggacaatgcatttgcggagattgttcgcgatcccttcatgattaccgaccgcgttacctgggcccagctgtcagtcgcgttgaacatcaaattcggatcgtgcacagggcgttctctgaccattgataaccttgatttcctatacgagaaactccagcgtgaggagcggtctgagtacattacgtggaaccaattctgtaaggagcccatgcccgatcggtcctttacattctgggagtggttctttgccatcatgaaactcaccaaagatcacatgttgggcatgtggaaagcaggctgcattatgggcttcatcaacaagaccaaggctcagactgatctgctgcgttcagtctatggtatcggcactttcctgctccgtttctccgacagcgagctcggtggagtcactatcgcctacgtaaacgaaaatggactggtcaccatgctagcgccatggactgcacgggatttccaggtgctgaacctggccgatcgcattcgagatctggacgtgctttgctggctgcaccctagcgaccgcaatgcgagtcccgtgaagagggacgtcgccttcggtgagttctactcaaagcgtcaagatcctgtgaccggttatgtgaagagcacattgcatgttcacgtttgtagaaacggagagaatggatctactagtggaacaccgcatcatgctcaggaaagcatgcaactgggaaatggtgactttggaatggcggacttcgatacgattacaaactttgagaacttttgaaactataaccactatagaagcctacgtataaacgaaatcagataaactcctgaacgtgtgtcgctatcttggaagtccgacgatgacgattccgccacctcaacgattgcaacgatctggcgcatgactcattgtgctaatcgaaagttttatttaatgttatctagatgtaattattagatttgggaatgcatcgtagtggaaggttttgtttgctttttgtgaaacgccaaaacacaagaacaacatcaacatcaataagatctagccgatcaatgcatgcaaattgagcacctcaacacaaacaccttcagctcacagccagaacattgtctatataatatatcgtgattatgattgtgtctgacttatgcaaaatttagaatttctgtgttgtataaacctttggaatgtgtccgcacgttgttttatatttttatatatatcttttatatatgtatacatatgatttcaatttgtgcactatgacgtgttcgtctgtgacaaagcattacgtttagatgatactgacaaaataatcggtttagttagtgagtaactatttgttgaatctaaatttttgattttgattttaattttatggcctaattttaaaactttgatatacaatttaattcgcgtgctaagcctatgttaaacgaaagtggaaaaacaatcaacgagagcagcaacgcagggattgattgctttaattttagttataatctaagtaagattgaattgctttatgtaaccccatcctttattggcttccaatgctgaaaatgcgcaaaaatttgaactaatcaatgtatatttttttgaaacttgtttgtttgagtcatcagggcagagtttgcaatgcatttcaaatgcgccacatgcgattgcctttttagtcagctattagagacacgaggaccatattacgtttgtttgagagatcgtaaacataatcatttatgtatgtaaacaacaacaataacacaatactacacttagctttgtacgtgaaccttaagaattttataagacttaagtacaccccaaataaatatacaattcaataaacttgaaa

SEQ ID NO: 241 - DNA, 3976 bp, Drosophila melanogaster
agccctgtcggcattttcaatagaagaagaagaagttaaacagtgctgtgtttttttttataacaaacgcaaattagttaataaattctggcgcagaaccggcatttgagcgatggaaacgcaacctgaggtgcccgaggtgccgctgcgaccgtttaaattggcgcatcaggttgtgagcctcacgggcatcagtttcgagcggaggagcataatcggcgtggtcgagctgaccattgtgccgaacagcgagaatctgcgcctgatacgcctgaatgccaagcagctgagaatctacagcgtcgttttgaacgatgtctgccaggcggatttcacgtacttcgatcccttccagaacatctgctacaaggagcacaagagccgcgcgctggaggtctactccaagcatcatctgaccgccgcccagtacaccgatcccgatgtgaacaacggcgaactgctcatccaggttccgcccgagggctactctatgatccaggagggtcagggtctgcgcatccgcatcgagttctcgttggagaatcccaaatgcggcgtacattttgtcataccacccgcttcaacggacgaggagacacagatgaacagctcgcatatgttcaccaattgctatgaaaactcgtcgagattgtggtttccctgcgtggacagtttcgccgatccctgcacctggcggctggagttcactgtcgacaaaaatatgaccgccgtttcgtgtggagaacttctagaagtcattatgaccccagatctgcgaaagaaaaccttccactattcggttagcacaccagtatgtgcaccaaatattgcgctggctgtgggtcagtttgagatctacgtggatccgcacatgcatgaagtgacccacttttgtctgcccggattgttgccgctgttaaaaaatacggttcgctatttgcacgaggcatttgaattttacgaggagaccttatctacgcgctacccattcagttgctacaaacaagtgtttgtagacgaattggacacggacataagtgcctatgccactatgagcattgcttcggtgaatctgctgcactccatagctatcatcgatcagacctatatatctcgaacctttatgtcgcgcgctgtggctgagcaattcttcggctgctttattacatcccatcattggtcggacacctggctggccaagggcattgcggagtacctgtgtggattgtattccaggaagtgcttcggcaacaacgagtaccgtgcttgggtgcaatctgaactggcgcgtgtcgttcgctacgaggagcagtatggcggcattattctcgattgcagtcagccgccagctcctttgcctgtttcgggcacaaatcaatcggcggcttccagcaaacagcaggagattgtccactattttcccatcaagagtttgcacaccgtatcgccgaagtatgtggaggcgatgcgaaggaaagcgcatttcgtaatccggatgctggagaaccgcatcgggcaggagctgctgattcaggtgttcaataagcaattggctttggcttcaagtgcggcaacgacaaagatcggtgcaggactctggtctcagctgctcatctcgaccaacatttttatcaaggccatcttcaccgtaaccggaaaagatatgtctgtcttcatggaccagtgggtgcgcactggagggcacgccaagttttcgctcacatctgtgttcaatcgcaagagaaacacgattgaactggaaatccgccaggactatgttaatcagcggggaattagaaaatacaatggtccattgatggtgcagctgcaggagttggatggaacgtttaagcacacattgcagattgagagtaccctggtaaagtccgatatcacttgccactcgaagagcaggcgtaacaaaaagaagaagatccccttgtgcaccggtgaggaagtggatatggatttatcagccatggacgactcacctgtgctttggatccgcctcgatcccgaaatgattctgctgcgcgacctcataatcgaacagcccgacttccagtggcagtatcagcttcggcatgaacgtgatgttactgctcaatttcaggcgattcaagccctgcaaaagtaccccacgaatgccaccaggcttgctttaaccgacaccatagaaagcgaacgttgcttctatcaggtgcgctgcgaggcagcccatagcttgaccaaagtggccaaccagatggtggcctcctggagtggaccgcccgccatgctgaacatatttaggaagtttttcggctcatttagtgctccgcacattatcaaactgaacaacttctccaactttcagctgtacttcctgcagaaggctattcccgtagccatggcaggtctgcgcacatctcatggtatttgcccgccggaagtgatgcgttttcttttcgatctcttcaagtacaacgagaattcgcgtaaccattacacggatgcatactacagggcagctttggtagaagctctaggcgaaaccttaacacctgtggtctccgttgctatccatggcacacaaatcactacggacagtctatccacggatgcgaaacttgtgctagatgaagttacacgtctgctgaacatggagaaacatctaccctcgtacaagtacatggtgtccgtgtcgtgtctgaaggtcatccggaagctgcaaaaattcggtcatctgccctcactgccgcacatttaccgcagctatgccgaatatggaatatatctcgatctccgcattgctgctatggagtgtctcgtggactttgtgaaagtggatgggcgcagcgaggatttggaacatttgattactctgctggaaactgatccggatccggctgctcgccatgcactggcccaactgctgatcgataatccgcctttcacacgcgaatctcgcagccgtctggataaacccaatctcgtggatcgtctatggttcagtattaaccgcttgccctacgataccaagctgcgctgcgatattgtcgatctgtactacgcactgtacggaactaagcgtccgaattgcttgcaggccggcgagaaccaaagcttctacaaggatttgatgaaggacaataatagcagtgtaggcagcgtaaccggcagcttcaagaagaccagtgattcaaagtcacatttgccaacaccaacgaatactttggacaatgagccacaggagcggcaaaagccggcaatggttaccatcaagcgaacggccacagaagcatttgaggtgggcgatgagattatcaagctggaacgcagcgaggagatcaccgtgctagatgaaccagttaacgtgcaggcctatgacagtgagaccaaagtgaatgccctgcaggcagatgaagaagcacgtgatacccatcaggctgccaagcgccttaagaacgaaatgtacgccgaggatgataactcatccacaatgctcgacgtgggcgactccaccagatatgagagtagccacgaggagggcaaattgaagtccggcgatggtgggctcaagaagaaaaagaagaaggagaagaagaagcataagcacaaacacaagcataggcacagcaaggacaaggacaaggacaaggacaaggagcgaaaggataaggacaagcgtgacccgcatatatcacgcctgcaggcgcgcgagacagccactccggacactctcagctcggaggacagtagcaacagcaatagcctgccgcccatgaaccttaactaagtgagggttcttgcaggtggggaaactgcaatgtttgggggatagatgacagaataaaggtataataccttagacattacatttcttaaaggggttaacattatttgttagttttattcatatgtttatttgtcggtttataatttaacattaaggaagtgtgctgaaacatttttacaatacttacaaactagacaa

SEQ ID NO: 242 - DNA, 5789 bp, Drosophila melanogaster
agaagaagcgtccaacgagagcaaacgccgtgagaccgtgtgttttcgcagcgaattacgccaataaaaccgcactaagagcgcgctcgcagcgcgaataaagaatagcagccgcgtatggacgaaatgcggcacgaatcgctggaaaaatcgacggccagaccgaaaaatagcagcgaaattcgagcgaacgtcgtgtataagtaaaacgaaagttgtgtcgctctgtgcgaaagagagagggagaacccaatatttttgcaagccagaagtcgaaggtgaaattaaaatgcattagccacccaattgaagaggagtcaactacgaacaaaactttaagaatcagcgaaaaatcgtttgtgaacatccatacaagcacaaatcgttgtttttgcctgctctcgtgtagttcctgtgtattggtgcgcgcgccctgtgtgtgtttgtgcgtgtgcgtgcgtgtaagcattggaatggattaactacccaactaattccaaaacaataataccgcaacataatcgcaatagtcatgccgtttcaaggcgacagcctttagggaaacattcggtcggtcggtcagtcaaccaaaaatcagttgctataattagcacgcccacgttttaatttcaacgatcgccagcaaccgcctacgcggttaaatcgcaggacttcgccaacatggatatggatttggagcagctaaagaacgacttcctgccgcttatcgccgggatcaagcaggagcagctggatgccgtgcccacggatgccctgccccagatgagcacaccaaacacggccagcggtgcgcccacaacctcgtcattgagctcctcttcgctgagtctgagcaacccctgcgacagtgccgagaaaaggtcggagtcaaactcttcggcatcagccaagtttacccttttcaagtgcgtttactgcgctcaactcctcggatccaacgatcgccccaagctgttagaatgccttcacgtggcctgtgcccagtgcgtgagcaccaagttctcagagctggaccgttccctgccaccattgatccattgtccggtatgcgacaatgcgtcgcagcaggagttcatcgtggacaaccagttcctcattgagcagtgcaccgccggagacagtggcgatggggtcggacttctgggtctgactggcgaaggtcagaagagttccgctgcggcgagcatccagtgcagcagctgctccgatggtgcggtggccacgtcgtggtgcgttgactgctcggagtatatttgcgacagttgtgtgcaagctcaccagcgcctgaagatcaccaaggatcacacgatcaagcccaaagatgaggccaacaacgagcagctggccggagctgccggggtggacaagttgcacatgtgccagttgcatccgcaggagaagctttcgctattttgcgagacctgcgacaagctcacttgtcgggattgccagttgagcgaccatcgggatcacaaatacaagtttgcgcacgagattgccacggaatcgcgacaggcgctgtccacactcgtttccgaaatcaactacaaacgcttccttctctcctcggcaaccaaggttattgatgaccgccaacagctgatccacgacaagaagaaagacctcatcaaggagatcacagccatggcggtgaagatcaccaatacggtcaatacccgaggcaagcagctaatcatgagattgaacgaggtgtgcgacagtaaactcaaggtgctggtggaaaagaaggagacgctgcagttgctctccgacaacacggaccactgcatcgattttatgcaaaacgctttggagaagggcagtgatttcgccatcctctcgagcaaaaagtctctggtgcgtcacctgcagaagctgaagtgccaacgggcggatattccaaatccggaaatcccagtgcgcattcaggtgcagcttaatcaggtttccgatctgcagaaggtaatctcccagctgggcatcattatcgtcgatggcaaaccatatccgcccacaccgtcgcccaacggaacccctcagccgcaacacccaccgcgccagcctcctagcccgaacatggctccacccctgcgtcctggtcttccacccggaatgccagctggcctctcgccgaacggaccgcccgtcaacttcggaccgcagaacggaccgccgctctacagcaatgctgcccagcagcaattcaacaatctgtccatgagtcgctcctttccgggtgacgggtcaggtaaggttcggttcgggggaatgccgccagtgggcatgcagcgacacggacaaccgcacgtgagctcctccacacatccgcagaatatggacatcagcctgcggggcctactgaacaaccaggcggcgcagagcccgaatgcccacatggcatttaatggaccgcccagctatccgggtgggccgcaaggagcaccggctccggcccaccaaccgatgggcccgcagatgcgtccgcatttcatgcccggccagcagggtttctcgcagggcggtggaccaggaggcggtccgcgggacgccaactttatgaacagcaacgcgcgcttccagtcgcagtatcagcgtatggccaaccacgctcagcaggcggcggctgcggcggccatggccggtgcggcggggggcggaggcggccaaatcccttcgccgggtgcactgcagcgaccgcagatgatgtccaatcccatgcagaatgtgagtgccatgcagaattcgttggggtttcatgggagccaggctggctttaataccggcccaccacagacctccccgcagttaggcggcggaggcatgcacagcctggccaagtggcacatcccgcaatccgcgcaacagtcgaacatgtgttcgcaacaaggcccccttttgccttttgcgaatggccgccagacatcggaaaattttaaaatctcacttaaatctcccaacacgctcaaaaatagcaccccgcccagcctggggggcggtggtgcgggtcaccagggccacggaaacggctcctccagcgcccaactgaacgcagctgctctgggattggggccagccgtttcgatactctccaatgtcacctcgacgaatccaaagacgcccagtcccagcactcatgagaacaccaaggacttcaccgaacccattgacaaggtgcgagatgactcaatcaacgatctaattgcaaccatagccaaactggactcgaatggggtacaggtattgccggagggtcggacaaagaccacctcgccgcaggtgcacagctcgacggatctgtccaacacacaggaagttaataataaaaacgaacaaaaagatgatcccaacgaggactggtgcgccgtctgtctggatggaggcgagctgatgtgctgcgacaagtgtcccaaagttttccatcagaactgtcacatccctgcgatcagctcgttgccggacgagagcgagagctggcagtgcctactgtgcgtcaacatcaaggagctgacaaagacggagggaagtgaaaagagctcctccggcgagctgagcgccctcgaactccgcatcttgcagcgcatctgcctagaattgtactgccagtacgagcagagtctcaacttccgggagccggagtcgccagccaatacatcctactacgagattgtttccagtcccatgtctctagatgttattcgcacccgcctggatccatccagtccgaatcactacaaggacattgcaggcttcgtgtccgacgtgcgtttaatattctccaacacatacctcttttaccaggaggacacgaaaacttactccaatgccaagtacttggaaaatttcttcgaggagcagctggccaagtggttgccgcaatttgagggcaccaagccgcagggtaagcgaaatacctcaaactcgccggcgctgttaggtgtgaatgcaactggttcgccgtcgcccatcgagaacggacggaagagctgcggctcggcatcattgggtgacagcgatggtgcctgcttgccggccaagagggcgagacgctcggcgcacgaatagaacgagctaatgcccggcgggaagggcacagatggggagcagcaggcggagacgggacaagaacgtcgccaggaggagcagcagcaactgcccgctttcctagaggagatggacctggagatgccgcaacggccgcacagcctgggcagtagtgtaatccaagagagcgccgattatgttcttcagttattacacgcgtacgctgcagcctttggtctgtagatgcacatttcccttactccgctaacatagagttcgttgtttcaatgagaaatcgatccgtaggcttgcccccacaatcgtgagacacacatacatctaaacaactagaccttaaaaagcagaggtgcccgattaactttagggtctggaaatatttaaaaactgagttgtaaatagtaaaaccaaggcagtcatttgatatgattttatttttacgtacaatggaataaattgaatccccttgggcgatcgagaattgaaatgagatatgtttagctaaattttaagtgttgaatatccataaacattgatataaatataactataaatatgtatacctttcattagggatccactagagattaaaaataggtgtaagtgttcaagttcgagtgaaattgacatccttgtttcaccgatttgtgtttgggatggaacccgttctaaccaatctttgttggaattgtatttacttttgtgatagcgaaaaacaataagatgaacaaattaccgtttattaatatatattattattaccattaaattaaacaatgtggcaaagttctaccatcatttcgaatttgacatgtacgatatttattgactattgaccgctaaccccatccatcggtagaatctaattaggacgctcatgtgcagctccctaagctcctaagctcaccccaaaaaaacagcatacattcgtataccacttaagaagacacttgaaataagttagctgctttctagccctctaagtttcgcagatgaatcaaacccttaaattacgagtaagcgaattcaatgtttgaatgttgtacgtttgacgtagtaccatacagtaggtgtaaggagtgactagctctatttattaccaatcgatcggcgggacacgacttctgcaagcataagatgtacataaatatttccgacacagaatcagcttttcatatatatttatataaatatatatgtatgtatatctttagccgaccgtgtatgtagttttttataatgccggatcgaaactaaaataaaaccaaatcatctaaggtcgatattttcataaatgttttcaacgcaagacacaaagatcagacacgaacagaattaaaactggacaactacaagaatatattgcaaccaggcggtaaaacgtctgctactcctaatgacgccacaatagggaatatataggggcgcaaaaatattaatgaaattatatagccatgcataaatgtttgtacgacgtgctcgattagcggacgttgatgtgtgctagctatcctattgcaaaacacgagaaaagccaagtagatcatgcggggcatctgctaatgtttgtatgataaatgtgaaactatggaaattattttatctgttttagccgtaagttttacgataactaaagattaaccactgtatatgaatgtactacttactatcgagtggattatgaaataataaaaaaaaacttcctgtaa

SEQ ID NO: 243 - DNA, 1842 bp, Drosophila melanogaster
tcgaatatggcagtcgtctcgacaatctttagcattgcatctctatcatcgacgacgcgcttgcaaaaaaacgaaggaaattagccaatttctattttgccctgacgttacgccgtttaaagtgtaagttcccggccaggattcgactcaatccctgccacaacgactttcggtcaagtgttcgttgcgagagctttaactacgtagcgaactttcgtagtttttctgcacacgttttgccgcttcggcttttgttttggcgcccgattttttcggctgccgacttttgacgcagactgagaaattgcgtgcctaaaagcctcgaaatggtggatcgcagcgataatgcagcggaatccttcgacgacgccgtcgaggagcgcgtgatcaatgaggagtataagatttggaaaaagaacacgccgttcctgtacgatctggtcatgacgcatgccctggaatggccctcgttgactgcccagtggctgccggacgtgaccaagcaggatggcaaggactactcggtacatcgtcttatactgggcacacacacatctgacgagcagaaccatctactcatcgccagcgttcagttgcccagcgaggatgcccagttcgatggttcgcactacgataacgagaagggcgagtttggaggctttggatcggtgtgcggcaaaatcgaaatcgagattaagatcaaccacgagggcgaagtgaacagggcccgctacatgccccagaacgcctgtgtaatcgccaccaagacgccgtcgagtgatgtcctggtcttcgactacacgaagcatcccagcaagccggaaccgtctggcgagtgccagcctgacctgcggctgcgcggtcatcaaaaggaaggctacggactctcttggaatcccaacctcaatggctatttgctgtcagcctctgatgatcacaccatctgcttgtgggacatcaatgccacacccaaggagcatagggttattgatgccaagaacatcttcaccggccacaccgccgttgttgaggacgtggcttggcatctgctacatgagtctctgttcggatcggtggctgacgaccagaagctgatgatctgggacacgcgcaacaacaacacctcgaagccctcgcatacagtggacgctcacacagcggaagtcaattgcttgagctttaatccctactcggagttcattctggccacgggctccgctgacaagactgtagctctatgggatctgcgcaacctcaagctaaaactacattccttcgagtcgcacaaggacgagatcttccaagtgcagtggtcgccgcataacgagactattctcgcctcctccggcactgaccgccgcctacacgtctgggatttgtccaaaatcggcgaggagcagagtacggaggatgctgaggacggaccacccgagctgctcttcatccatggcggtcacactgccaagattagcgatttctcgtggaaccccaatgagccatggatcatttgctccgtgtccgaggacaatattatgcaggtctggcagatggccgagaatgtttacaacgacgaggagccagagattcccgcctccgagttagaaaccaataccgcttaaagcatctgttccgcctcctataatacacaccaaactacaactgaatccgataatgttttggccgtgccccgtgtccagctatccagcctaaatggcaatgggtactcattttaatttatatatatttacatatttttaaaaacaaaatttaattaagctctcatttgtcagcagattgtacaatctatgaatttttaattaaaaatgattaaaaagtcaagaa

SEQ ID NO: 244 - DNA, 3547 bp, Drosophila melanogaster
acatttttcttgctgaccattattatcgaagttgctttacccgataggttccagacaaacaatatcagacgtctttgttttgcttaaaaaattaatagttcttattgttaattaccggtgccgcattaaaaaaatactgctctattgacgacgtagaagctgaaaaaattgtggagtgaaaaattgtaaaagtgaccgaaaaaactatactttggccagctatatttccacttacatcacaccagcaatgaacatgtacaacggacagatgaacgccttcggaggcggtggcggcggaggagctggtggcctagccggcggtatggtgcccaatcgcatgggcggtggtgctcccggtggcggacccggcggagcgggcatgttccagcgcaatcgctcggccccatacccaggtttcaatggtcatggacccgccaacggtggacagcgacgcatgaacggtggtggtcctagcatgggacccggcggaccacgcaaccaggatggattcggtggtcagaacgggggccagcgctcttccaatcatggcgctcacttgcccaagatcgtttggtctgaggtgaatcttacgccattccgcaagaacttttacaagccgtgcgattcggtgctggccaggactgtcggtgaaacagagaccttcctcaccagcaatgagatcaccatcaagggcgatcaggtgcccacacccagtattgaattcgaggagggcggctttcccgattacgtgatgaacgagatccgtaagcagggtttcgccaagccaacggccattcaagcccagggttggcccattgctatgagtggacgggatctggtgggcgtggcccagaccggatcgggcaagaccttggcgtatgttctgccggcggtggtgcacatcaataaccagccgcgcctggagcgcggtgatggacccatcgccctggtcctggctcccactagagagttggcccagcagatccagcaggtagccattgagtttggcagcaacacgcatgtgcgcaacacttgcatctttggtggagcgcccaagggacagcaggctagggatttggagcgcggcgtggagattgtaattgccacaccaggtcgcctaattgatttcctcgagcgcggcaccacctcgttgaagagatgcacctatctggtgcttgacgaggccgatcgtatgctcgacatgggcttcgagccccagatcagaaagatcatgcagcagatccgaccggaccgtcaggtactcatgtggtcagctacctggcccaaagaggtgcgccagctggccgaggaattccttaataactacatacaggtgaacattggttcgctttcgctgagcgccaatcacaacatcctccagatcgtggacgtgtgcgatgagaatgagaaattgatgaagctgatcaagctgctaacagacatctcggcggagaacgagaccaagaccatcattttcgtggaaaccaagaagcgtgtggacgagatcacgcgcaatatctcccgccagggctggcgcgcatgcgccatccacggcgataagtcgcagcaggagcgcgactttgtgctctcgagcttccgcaatggccggcactcgatactggtggccaccgatgtggctgcccgcggactcgacgttgacgatgtcaagtttgtgatcaactacgattatccttcgaactcggaggactacgttcatcgcattggacgcaccggacgatccaataacaccggcaccgcctacaccctgtttacgcattccaacgccaacaaggccaacgacttgatccaggtgctgcgcgaggccaaccagaccatcaatcccaaactgatgaacatggccatgaacggtggctacaacaagcgcggtggcggcatgggtggcggctaccgtggcggcaatggctatcagggccgcaatccccagatgggcggtggatacaatggcggcaacaactaccgcaacaacaatggtcccggcgccaccatgaatcgcaactcctttaacggcggcagcgctggcggaccaccacgcttcgatcagaagccgcgcacttctccgccgaatcagggcggacagggcggctaccgtggccagggaggcggtggctaccagggacaacagcagcagcagcagcagcagaacggcggagtgcccttctctcgtttcaatcccaatgctgcttgcttcgagcccaacaagccgcagaatggtccgggatctggaccgccacaggcgcagcaccagcagcagcaacaggctcaggctgcccagcagcaacacctacttcctgatgcatccgtgcaggcggcgatgacggctgcaaactacggagttgatcagaagcgctcccgtttctcgccctacaacatgaactttgccaacatgccaccaccagcgatgaaccagcagcaggcggcggcggcccagcagcaacagcaacaacagttgcaaactccccagcagcaacagcagcagcagcaaatgcaacagccacaggcctatggccagtactcttcaatgtcctccagcatggcaaccgtgtcgctcaacggaggagctgcagcggtggccagctcttaccgcgccccgtacgcagtgcccacgcaggcggcaccctatatgatggcgaacggcggcgacatctttgcctatccgccgcctccgctgcctgtgcagaactagaggccctgcggttcgatagaggctaccagattgtagaccagctctactgtaatttcctttccccacacgaacattacacgcacatccgcacacccacccgtattaattgtacacaagtcacgatcacaagtccagagacttcagagggaagatgttagatgagcgtcggtgatgtacgtatcgtgtagatctcctccgcccacatcatagctatataatatggtttaatctggaatcaaatacgcttttaatttgattaatctctttgttccccccaaaacaaaacaaaacaaaacaaaaaccccacatttagttgataagcttttggtttagtcaaattgttagggcattcgagtgccgatcatcgatgttgttggcatttatctttccagagccctgggcgtatttgatttctttatacaattctcgaatattgtacgtatctattcatacactgcaaaatcaatgtttgcaatgctccaaacgaacccaagccaaaagagattagatacaatcgaataatgaaggaacactaagtgggataaagctcccggtacacctttcacactatcggacacatttacacataagaaacaatgtcaatttcgtggaatcaaatgcgtattattatgtcatcttaaaccatattatgtgactagtctaatgaattgcttagctggacacttttcacatcgtaacaagaacttcaaacataaaacacaaaaacaataaaacatcaaaatacgttcaaaaatttgaaatgtaattccattttatgtcagcagcccataagtatgaattgataacaagatatgaataaaggaattaattagaatttcaacc

SEQ ID NO: 245 - DNA, 689 bp, Drosophila melanogaster
tgaacgtgtttacttgggcttcgattgcgaatacacaaaaccaactttacgatggcaattacgcggcggcttccctggccgaagctgctgtttttgtttgtctggctgtgtctgtcattggatacaaatcgtgcagctcgagtgcccagcgatcagtttgtgtttccctcggagtccaagccaaatgccacagccatccgactggaatccagacttaaggaaatcgagcgagaaatggcggaggtgactagagccacaaatgtaaatctaccaatcctcaaagaaatcaaaaagggcacaccgagaactacggctaacgacaacaagcatgagtcaccggcaaatactaccaatgattcgaaaaacttgaccgaaccacagggaaactcatcaacacaagagattaaaatgaacgatgtgcccagcatttcgaaaaatcatgcacatccttccagcgagtccaagatgataaccttcggccaggaatctagttcagataagccagcgccttgggatcatacggaagccaccaatgctagcagtgccactagtgtggttattgggccaaggattgtcctggaaacaacgcgaatttgtccacagggcactactctgaccgtaaatgatcattgccgaaaaattgcctagattagtgccataaaactgggaacaactgagaattaattaac

SEQ ID NO: 246 - DNA, 414 bp, Drosophila melanogaster
gcattagttctcccagtaaatccaatcatggcatccccagtagtcagcctgcttctcgtcgggatctgcgccctggcctttgtccatgtggctcggtcggaatgctgcacctcccgggagctggtggaattcaagatggacagaggcgactgcgaggctgtgcgtgcaatcgaaaactatcccaacggctgcgaagtgacgatctgcgccgatggtgttgcccagttgggcgcctactgcggccagggatcgtgcaacatcttcggctgcaactgcgacggcggctgtctgagcggcgattggtcacaggaatttgtgaggaggaaccagcagtacggaatccagatcatcaaagtcaccaggctgccattttaaccccttgcatcacataaacaataaagagaagctttaatt

SEQ ID NO: 247 - DNA, 769 bp, Drosophila melanogaster
agtttgccgtggcaagtcgaagcctgaggtcgtgtcgtcgtggtggcttttgttcggattgtcacatatacattgatgtatgtaagttcatcggatttcgccaaagcagctcattaaattcgcgctcagttcgtctgcagaagtcagcagtagcgtagaatatgcaatgagcgaataaaataaataggcgcagagaaatatataaacggtagttgtgaaagtgaagtgcacaaaccaaaatgcaccaaagcaaacgctccagcgaaatgtggaatcaataccgaaaccaaaaccgaaacaaaaaccaaagtcaaggatccagtggagtcacccgtcgtccaacgatggggcggaacaaaggagctgccgccggatcacgagcactcaactgtggcctgttgatgctcctgctgctcctccagctggtgggtgagcgcctggcgacgccatcgccatcctccatgcaggcgccacagaaacgaggtaggtcggaggtggaggcggcggcggaggaggcggcggtggaggcggtggcagtggcagctcgtcggacgtatcgagagatcactgcaacaagacggtggacatcttcgaggacatcagctcgccggaggtcagcaaccagaacgtgggtcgtccgctgacctgctggtaccgcttccggacgctgaagggagcgccccgcgactttgtgctgcgtctgcgattcaagaagttcaaagtgggtcagctgctgaatgcaacccactgcgagggcggctacttgcag

SEQ ID NO: 248 - DNA, 528 bp, Drosophila melanogaster
atgaaaaataaatggagtaacttcccccggattctgctcctgatcctgatcctgaccatgctgcagctgctgcagcagggtgtggcagccaccaccgaccctgacacaaccacgaatgcaacatgcagacatgccacggacatgtggggagatccggaccccaacatattctacgtgtgctccgatggcggacaaccgctgcagctggagtgtccgcctggccggggatttttcagcggtctcggttatctgggctgtttgccctatgaccactggccagcctgccgcccctcggaggagcaggtggccgcccaattgtcagctggctgtgacaccactaccggcatcgtgccatcgccctgggcctcgccggatcccaaccgattctacctgtgtcccagcataaatgccacacctctgctgctcaactgcgccgccggtagtggattcgtgtccagttccgaggtggtgggctgtgcggactggtcacaatggcgccgccagatggagtgcgaggcgtactactga

SEQ ID NO: 249 - DNA, 2468 bp, Drosophila melanogaster
tattgtttttttttttgtgtggcgatcggttcgtttattagttttaattgaatgctattccatatgtgctgcgctattaaaatgctaatgtgtgtgctattgggcaataaggctttaattgccattaactcgaaaactaagctgctaatctaactgtgcgacaggtgtaaatgttaaaaagttcgttggtttggtttttgtgagcgagtgaaatgcaaatttgctgtgcaaataagtgaaatcgctgttggctgccaatcaatggaaaggtgtactatatatttgtgcttttgatatatatgtatatattcttcgtttcaagtgcctttctttgggcttacgtttttgctgctggttcgccccgcattttttgacattttagaaggaataaatgctgtttaaagtgcttaattaagctgcgaattaatagaagtaaatgccgtatgccacgtaaatttaatcaatcgtaatgcagctcagttgtgacattttttcctgtttccctggcaaccaaatccttgtacatagcaacaacaaagaggccagcaataacacaatcagctgatccgacagtgctgaaaagggctggcatgtttaaatgcaactgacgacagattccctaagaacgtcgaacggcgaagtcgaagacgtgcgaaaaattatgatcttatctgggtaggaaccacatctcacccggcataaccagaggattgcatggatatatccgaactgtgatacactagccataattttacagactgcacaatggtgcgattaaacaggcgcctgctgcccatcaaggcacatttcttctttttcatggcggccatgggacccatattgccacaattgtcggtgatcggcaagcagatcggtgttccaccggatgttatgggctatattacggccgccttgcccctactttatgttttagccaaacccttggtgggtttcctagccgattatttcacgagcctgcgcaagttcatcttcatctcccttatcctcatcatgacactggccttcgccggcttctatttcctgcccgacaactcacatttcattccattggacgagggaagtgcccaatggaatgtaacgttattgacgaatccaaacgattgcaataccattatccaatcctccaacgcattttgtcaaaccactcatcaggcaaaatgcattcaggaagaaaaggaagtaggcgaattctccgctctaattgttgccaacgagtcgggcctcaatctcaaccagaatctgcttcatggcaacgagagttatcacatctgtctcacgcaaccagcagccatcgattggaacagtgcatcctgcgaggtgcgacacgtaaatagctgcatctatggtgctggcaagttctggctgttcgtatgcctgctctgcattggaatcgttggcttcaacgtgacaaactccatatccgatgcctgttgctttgaccttctgggcgatgaggagcaggaaaagtacggagcacaacgagtgtggggcaccattggttttggagccactgccatgctagccggaatcgtagtgaactggtggaccacggatgcggtcaaaagtctgacgcctgccttgatcatcatgtgcgtgttcagtttgctcgatctgttcagtgtgtccaagctgaagctgccgaaactgggtggttccgagtccatctggagcgatgtttggcaattggtgcgcaagccacccattctggtctttctgttcttcgccacaatggctggcatcattgactccttcatcatatactttatgttctggcacttggagcaggtggccgaggccactggttacatgcatcagatcaagttgatcgaaggtctagtggtggccgccgagtgtctggccggcgaggtgccctttttcttctacagcggaaagattatcaaaaaactgggctatgttcattgcatgagcatgtgctttttcttctacgctgtgcgactgtcgctgatcgcctggattcccaatccctggtatctggtgggcgtggagctctttttccagggcattacctatgctctgtgctatacgtgcattgtggcctacgcctcggcggtggctcctccgggaacatcggccaccgttcaaggattgatggccggcatggacgatggacttggcttctccatcggatccctaatcggcggacttatgttcaaaagcctgggcggacgagagagcttcaaatactttgccatagccgccatttgcacatgcgtagcacacatcgttatacgtcccacatccaggaagaggcaattcctgccgagacagggatatgtgccgccaacggaacaggagatcaagcagccgcccgctcaggaaatggaggagattcgtttgggataaacatagtatcaacacatgccatttttattgcatatttttgtactaattttttacgttaaacaaaaacaaagaaagaacgacaa

SEQ ID NO: 250 - DNA, 3943 bp, Drosophila melanogaster
tgtagccctggcgtataattgccatccctgctcgcgcaaatgcgaaagaagttagcacacaaaaatctgttaaaaactattgttaaacgattgaagatccaataatatgtcataccgcaagtgctagcaactggggaaacccaatccgaacgcgtccaacgtgcaaaagttcaatgcgagttcgaaaaacaaaggaacgcgacacgcagcagtagaaagcaatactttttgaagagaacccagaaagctgtcccataaatgcttttgccatactgaccaatccggaatcgatagcaccattggcttaaaatgaacccatccgagctgcgcatgatgtggatgagtagtcagtacaactcggagcgcattacactggaggatgcggccactctgctgggtcatcccactgttggactctctgtcatggaggacctctccgcccatcagccaactttgctgtctgtaaacgttgtggcgccattggagtgaagcacacattctacacaaaatcgcgacgtttttgcagcatggcctgtgcccgaggcgaactatattcgttggtacttaacactaagatggagggagaccaggcaaccactagttccccggatcctggagcgggttcggagtcagccgatttgcctggcgatcagcaacagtcgcagtcggatattgagctcgatctgcatgcggcgcacattaagaatgcgaattatcgttttcgcattacggatcaatcaaagattacccagttgaatagcttcggcgaacccatgtcaatgggcggcgacgcagctgccaataatgtacaaatggcagcagatgaaacaattgctgcgttaaacggcggagcagtgggcgatgccactgctccgggcagcaccgaggagggtgcatccacacccaattcttatctgagcgcagcacccacgcccaaggccttgcgactttttaaggacatctacccacaggatgacctgccgcaaatacccaaatacgagcgccttcccgtaccgtgtccgcaaatggagaagataatcagcattcggcggcgcatgtatgatcccacacactcctacgactggttgccccgccttagcaaggagaacttcaatgcggcacccgtcacttgttttcctcatgcacccggttgcgaggtatgggacaatttgggcgtgggcatgaaggttgaagtggaaaatacggattgcgatagcatcgaagtgatccaaccgggtcagactcctacctcgttttgggtggccaccatcctggaaatcaaaggctataaggccttaatgagctacgagggtttcgatacggactcgcacgacttctgggtgaacctctgcaatgccgaggtgcattcggtgggttggtgcgccactcggggcaagccattaattccgccccgcaccatcgagcacaagtacaaggactggaaggactttctggtgggacgtttatccggagcccgcacccttccctccaacttttacaacaaaatcaacgacagcctccagtcgcgcttccgccttggcctgaatctcgagtgcgtggacaaggatcgcatttcgcaggtgcgcctggccaccgtcaccaaaatcgtgggaaagcgcctcttcctgcgctacttcgattccgacgacggcttttggtgtcacgaggactcgcccatcatccatccagttggctgggcaaccacagtaggccataatctggctgcaccgcaggactatctggagcgcatgttagctggtcgcgaagccatgattgaggttcatgaggacgatgccacaatcgagttgtttaagatgaacttcaccttcgacgaatactacagtgacggcaaaaccaatagctttgtggagggcatgaagctggaagcggtggatccactcaacctttcatccatatgcccggctacagtaatggcggttcttaagttcggatacatgatgatacgcattgattcctaccaaccggatgcctcagggtcggattggttctgttaccatgaaaagagtccgtgtatctttccggctggattctgttccgtcaacaacatttcggttaccccaccgaacggctacgactctcgtacattcacctgggagggttacctccgcgacacgggagccgtagccgctggccagcatctatttcatcggattattcccgatcatggatttgaggtgggtatgagtctggagtgtgcagatctcatggatccccgactcgtttgcgtggccacggtggcgcgagtggttggtcgactactcaaggttcactttgacggatggacggatgagtacgaccagtggttggattgcgaatcagccgatatatatccagtcggatggtgtgtactggtcaaccataagctagagggcccaccgagagtagcacatcagcaggccccgaaaccggcaccaaagcccaaaatacagcgaaagcgaaagcccaaaaagggagcagcgggaggcaaaactccaaccgataataatactcagtcggtcaaatcgcgtacaattgcgctcaagaccacgccgcacttacccaagctgagcatcaagctggagctaaagccggagcatcacaatgctgccttttacgagaacaatcagcccgaggaggaaggcgacgaggaggatcccgatgcggatggcgatggagacggaagcaccagccacatctccgagcagtcaacgacacagtcgtccagtgatctgatcgctggatcgggcagtggaagtgggtccgcctcgctggtaactctcgccacgggcagtaacaaaacgaactcctctgcgacgaataataagtacattccgcgtctggccgacatcgattcgagtgaacctcacttggagctggtgccggatacatggaacgtgtacgacgtatcccagttcttgcgggtgaacgattgcacagcccactgtgacacgttcagccggaacaagatcgacggaaagcgactcctgcagctgaccaaggacgatatcatgccactgttgggcatgaaggtgggcccagcactgaaaatttccgaccttattgcacagcttaagtgcaaggttaatccgggcagagccagatcccacaagaccaacaaatcaccgtttttatagtgcgcggattttagttttttcaaagcaaaacgaaagttatcaccgatagaacacacacacacacttttatacgtgtacactactgcgtatgcatatataatatatatatatatatatatagatatatagatattgaagtattttgttagcactggaaatcgaaacacaaacgttgcctagaatggatcaaccatccatgatacaattgtataactaactcaagtctcacagcgcgttattttataccgattaaattgtaaaccgtagaccttaggcgtacgctcatgttatatcagtcagagttctatatcaacaattgtataaagatgattgaattgatgacagtgactttttttaaatcacgcatatttttataaaaataagagtaataacaatgcatgcaacacatgtattcacatgaatatatggggagattgcatagcatgggcttgtacagtgtacataaaataagccgtcgccgattatataggacccaagaatatcatattttatatagaagcaagcgcaagcaaataacccaggcagcatgccctcaactttcagtcgtaaacggagcgattggaagtcgctcctagtctgtaagatccacgattaactagccgctctctccttcggttaacttcgttccggtgtcacacatctctgcaaggagggcattattggtgtaaggcaaacttttgaagaaggcaaccttaatgataaaatatgtatttagatatccctaaggtaccagctaatgtcaagatactttaataaaaccgaattcaaaattgcaagtattgaaatat

SEQ ID NO: 251 - DNA, 4088 bp, Drosophila melanogaster
tcaattcgtccatttcggccgctcttttcatcacacgctaccgaacatgaatacaaataactggtatatctcctccagtcatcgttttccctaggtgttatcgatcactatcgaatagatgtcatattgcacggccgtctctagatagaaagaagaagcacactaaattgtagttttatttaatagttctagcgaaatagtgaattttggccatttaactaaaaaattgtaatgtccaggcgaaattgaccataagtgcggtatctgtgtgttaaatagtgcggaaattagatcgcgtgcgagtgaactatgccctttttggcaaccagagcaacggtgtcactgcattttagcgaaaggaaacactaaatgcccattaaaaagcgcacgcgcgtataaaatgcaccattaaaggcttgagaactttaagtttttcattgcgaacagctggagctaagcgacagtatcacaaattgcattggctgaatcggattacacaaattgagccaaccaaacgccatgcgagcctccattccgcccggcattcgagtggtgcgcggacccaactggatctggtcgaatcaagacgacggagaaggtcacgttggaaccgtttgcgaaatcggacgttgcggatcgacacattcgccagaaaacactgtcgtggtcaactgggattccggacaccggaccaactaccgtgtgggctaccaaaaccagtacgacttgataattgtagataatgctcaagttggagttcgtcactcaaatgttgtctgcgatggctgttccaaggcgggtatcgctggcatagtattcaagtgcgcccagtgtcccaactatcacctatgcgcctattgctacgcagaggatctgcacgatattgagcacccgtttatccgctacacgactcccaactcgctgggcgtgagattgcccatgagaaaaggtgccaagcgcatccagctgcgaggcatctttgtgggttccaaagtagtgcgcggtcctgactgggagtggaacgaacaggacggcggagaaggcaggacgggtcgggtaatggaaatccgaggctgggacaacgaatcgtgtcgcagcgtggccaacgtagcgtgggtaaccggatcgacgaacgtctaccgtctaggtcacaagggaaacgttgacctcaagtacattactgccacgtgcggtggtcactactataaggaccacatgcctgttctaggtcagacagaggagttgcagccggtggcgcccatggtgaagccaagcttttccgtgggcgaccgcgtcaaggtttgcctagaggttgacgccctaatgaaattgcagcagggccatggcggatggaatccgcgcatggtcgagcatttgtccaaactgggcacagtacaccgcatcacggacaagggggatatacgtgttcagtatgaaaactgtcccaatcgatggacctttcatcccgccgcactcgttaaggttgtctcttttcgtgtcggtgacctggtcaccatcatcaacgatgccaacaaagtgcagcagctgcagaagggtcacggcgaatggatagaaatcatgcgacacgcccttggaaaaatttgcaaggtagtgaaggtgtactcggacggtgacctccgcatccagcagttggacgacggcttcgagtggaccctgaatccgaaatgtgtcaaactagagcgttctcctttggcaacagcagctgagcgctctaacagtatgatggacctaagccaccgacgcgctgaccatgtaatgacaccgctctctggcctctccggtagttcggttgccgacaagctggtgcgcgaggctgcccagggccatttggatttcgtgcggcagtacctggacgtgaatcccagccaggtggatgtgatgagtggcggcaaggcttgtattcaggtggcctctcatcagggctacgtcgatcttgtcagctacctcatctccaagggtgccaacgtgaatgcggtcgacaaggaaggtgattcagctctgcactacgcagccttcggcaatcagccggccaccatgagagtgctgctgcagcacggtgctgaggtgaacttcctaaactcgagccactgctctgcactgcacatctgcgcgcacaagaaaacgccgcactgtgtgcgtgagttgctgcagcacaatgccaacgtaaacattcaggattcgtacggggatacggcgcttcacgacgcaatcggcaaagagaatacggaagttgtggagttgctttgtaatgctccgaatctggactttacggttaagaataatcgcggctttaacgtgctacaccatgcagcgcttaaaggaaacgtggtagctgctcgccgtatcctgttgctctcccgccagctggtcaatgtgcgcaaagacgatggctttgcggctcttcatttggcagcccttaacggtcatgcccaggttgtggaaacgctggtcactgagggccaagcggagttagatatacgcaataatcgccaacagacgccgttcctactggccgtctcccagggccatgccggggtaatcgagcgactcgttcgcctctcctgcgacgtgaatgccaaggatgaggatggcgacaatgcgatgcacttgtgcgtcattaagaagtccaatctgcagtcggccgcggagcctcagccagaggaggctcctgagattcacaagttttacctgagtctagtacactcgagcattcgtcctgaggatcgtttgatgtacagtatattgatctatctttcgagggccggctgccgagtggagctgaacaacgccaatgcaagcatttttgagtggataacggaccgccacatcaggcaactgatttttgggcagcagggcgaagctgaatcgctgcctaggaatcttcaagctttggaagtgtccgcaggatcagccgacggtgaggagagctctgcgtctgctggagctgaatccaatggagccggacctggaagcgttgcagcacccccaccaccgcagcgccagacatttgaactaatgccaaagccaaacgatatcccagccattggagttggagcatctccatccacgccctccgcctcgccgggcgtaaagaaactgaactccgacgcaacaccgcaaaacgtctctccacaggtggcaccgcgcaagaaggcgcccaagcctccggttaccactagctcgagcagtaccgcgttggaagccggagcggcgggacccagtaccagtccggtgatcgtccccggtccccatgagtgcattgtgtgcaatgagatcctgccgatggtgcgctttgagccgtgtcagcatcagatcgcctgcgaggagtgcggcatccgaatgaaaaagtgtctccgctgtgccgtggcgatcgagcggcgattgacggtcagcggccgagtggtggccctgcccacgtccacgtcgtcacctagtgaccccactcgcctaccgtccggggatctacttcgctatctggagaacaaagtgctggagtttgaggagtcgcacttctgcggtatttgcatggagcgaaaaagggatgtggccttcctgtgcgggcacggcgcgtgctcccattgtgccgaaacgctccgcacatgccacatgtgtcgcaagacaatactcaagaagatcaacctgtactgaacggcggtaacggaaacgaaagaaaagcaaaggcggcaggatcagcagcaattcaaacagcaaccaaagtggcttgtatatatacatacacaaaacaaacacacactcacattgccgtgtcatgtgcaaatcgaaattattatttattgatcacaaacgaaatttacgagttcttttttaatcggttcatcatcggcatcgtcgcaacacgcaacaaattaatgtgcaccttctcgtgtctagttattagccccgtttaaccatgtctggtaacgataaatacataggaaactaactaaagcatacaaatatttaatagtcatttaaatgcaaatatacaaatataaaattatttaattgagtgaatttcaatcgatgtcggtggttagcctacagaaaataaagatactttatttctg

SEQ ID NO: 252 - DNA, 1531 bp, Drosophila melanogaster
gtcgtcacaaaatagaaccttacatttaataacgaataataacaatggacctgcaattggacagcgaaagctattggaaccgatcctctcgcgcagcgttcagcttcgacgacgaagacgaggtggacctcgccccggatctggtcagcaatggcatcctcgccgacgacaccatttcggaggccagcttcaataacagtgtcgccctgaatctctcgatcaaatccattctgagcgaggaggcattgaaactggtgctgcaggaacaggcgctggacgacagggtcctgcccaagggtgtctcgccggaggaggagctgaagctgctgcgccgacagcttcagagcaccctgtacagccccaatctagaagccactgcacagaagctgctgcaaggaaagactgcgcccttggagatgttcaagtcgctgcatgagaagcagcagctgctggacaccctgatggcacaaggtggtgggcatgccgtcattacagtgttgctcttcctcaagagaactctgaataccacgcagtttcatggcattctgagggagagacccaaggccttggagcagtatctgagttacctgaaggaaagtggcgacctggcgggccatattgagctactgcagctatttggacgccaccaggaggcggctcttaagcagtttcaggcagcgctcgcttccggagatacgagcaccaggaagaaacacctccagcttttggtggatgcctatgccacagcgggagtgggtgtaatacctctctacgagcaggtttttcacgctgccctcaagatgcagcagctaatggagaaggatagcgcgctcggcaagctgcttcgggatcaacccactccagtggaagtgctctatgcttgctgccaggtgaacagcaattggaaagagcaggatatgctcaaaccagtgtcacctcagcgttttgccgccgaccagcaaatatcgccggcccagtacgagtggacggcgctcaatgaaagggcgcaggcacaggcttatgcggatctggagtgcatatttgagcgggtgcccagttggcatccgctgaagaccaaacagtttcacatcagcttcgatctgacgctggccgtgctccggctgtacgagctgcaggctccctcgaccgtccttcagctattcctctccaagatgggcaacagcgttgagaaactggcgctagcccagcgggtgaagtgcatcaaggcggtcatagatgccatggccgggttgaagcagcagcaggagctacagcagctcaaggacaccctgcccgagcgatccgaggagcagttctactgcgagaatgcgctgaaaagcctccagagcaagcgatggactacggacaacatcaagctcaagttgtaaaattgactttcttttacttgtataaacgtattttattgttaatcatttatatgtgtatataattatattactactactctggttttattaaataattgcaaatcacaagctgaatatcgaataaaaaacaaaaatttgtatca

SEQ ID NO: 253 - DNA, 4617 bp, Drosophila melanogaster
gttttcgttttcccaatcgcagccaacttcacttcaacgcgttcggtataatatttaggtccatttatttattcgcaacaaatgcgaatgtaaaaacgaatattgcgttttaattgtgcgcgcacggtgctagcaaccattgcgacttgactacggtgacatttccagtgtgggtgtcatttgccagacagcgtgatttggcccgaaattcccccaattcagtttttcacatcgccagcttttcagcggtgcacattgagtgaataagcgtgtgtgtttctgccgccaatccaaattgaagcgcaagaatggatgtggcgaagctggagaagatgaaggtggtggacctgcgcaacgagctccagtcgcgcggcctggacaccaaaggagtcaaagcggtgctcgtcgagcgcctgagggcatatgtggaaggaggagccggcgacggtgaaaatgcgccggtcacaccaagccgccgtcagcgtcgcacgcgctctatgtcccgctctccatcgccggtgcaagctgctcccgtggccgcagaaccagtgctcgatactctcgaagaggaggagcagccggaggataagacagtgccacagccagaaccagaaagtgaacagccagcagccgagccggaaccagaacaaagtgagccggaggaagctgagccagctgcagcagtgacagaggacacaaccgtcaaccaagcggtcaatgaggagtcgcagcctgagcccgaagagtttgatgaaaagtcggagacagacgacaagcaggagacaatcgaagaggcagtacccgccgtcgtaccacagaatgaagtggctgatgaacccatggaagaggatcatgatgctgcccctgaggagcaggaacctacacaaactgaggagcctgtagaggagaaaccagccgagagcactgtggccgagcatcagtcaaatggcgacagccagaaaatggacgttgatgaggaggattcggccgccccgaaaacggcggaggagaccgagccagcagctaagcctgaggatcagcccccggaacgccgcaagcgatcacacagtcggtccaaatcccgatcgcgcagtggctcccgctcgtccaaacatcgcggcagcgtaggtgacaagcgtgagtcaaaggcagcggccgaggaacgcacagttcctgaggacgagccaaccatcgaggagaacaaagtcggattgagctggctggactctgacttgcatttacgcatcgacccaaccacgtttgcatcggccaaacccctgacatcggaaatttactcgcttatttggtccggagcccgcgcaaactacggagtgcgcgaaggcaaagtgtgctttgaggtgcgcctttccgaggagtcggtgccggagaactcgcactacttccgcgatgagccgcatgtgcgaggattccgcgtgggattttcaatgcccaagagctccttgttgctaggcgaggccgagcattcatttggctattgcgagaccgggcgtaaggctactcagagcgagtttaccgattacggcaagccttaccagctggatgacgttatcggctgctatttagatctggaaagtgagccgtgcacaattaactacactctgaacggcgaggatcttggagttgcgttcgagtttgagaagagcatactgggcgaggagggagccctgtttccgcacatcgttaccaagggctacgaatacttagtgaatttctctgacaccgagcagctgttggtgaatgccgagaggcccacgcgcaagcgccgcaagccacgtaaagacgaagacaaggataaggacgacgataaggatgacaacgatggcgagaagtggaaggtcttggacgaagccacggcggatgatgatgaggtggagaaaaaggatgaagatggcaaggcttcttcggagaaagatgaagaggaagccgaagatcctgaaaaagccaaagaggatgaggcggcgccaaaaacggaaacagaagccgaaactaaagtcgaggctcctgctgaagctgctaagcccgaatcagaagctaccgaggcttcggaaactgctgaaacttctaccgaaaagtcgtcagaaactgcagctgtgtcaaatggtgatgctgctgcagaacaggcaaacgatgaaaaggcatctgaggataagaaaccctccgaaaacaatgatgaagaagatgaggatggcccctcgccgaacaagcgacccaaaaccgatggagattcggaaaaggctgaatccgaaaaggaaaaggacaggtcgcagacgaccgaagatgagtacgaggatgtcgtgcccgagccaagggatacagctgccctgctggaaggctatgtattgatcggcttagtacctgtcgaaaagctggtttccggtccacaacgcgtcggatctcgcaaggagtgcgaagtcattttactggttggcttgccaggagccggaaagacccattgggcccataagcatgtggccgagaatgctgacaagcgttacgagttgattggacccgacgcattcatttcaaagatgacaatcgatggcgcctctcgcaagactgtgcacaaaggtcgatgggacaaggtgtacgagatatgcttaaatagcttggcggctctggaagatattgccatgaagcggcgtcgaaatttcatacttgatcagaccaatgtgtatgcctcggcccagcgacgtaaaatgaagggttttaacgacttcaagcgaattgcggtcgtttgcatacccagcgaagatgaattgaaacgtcgcatcgccgaaaaagaggaaaagggaaatgcttttacagttaaagaatcaacaattaataatttacgagccaacttcacacttccctcgctggagtttggctggttcgatgatataaactacacggagctgactggtgacgaggccaagagcgaggtcaagaagtacaacgagaagggcaaaaaggccattgacgcggagaggtcgcgtgacaagagatcccgaggaagtcgcgacaactatcgtcgtgatgaccggaaccggaatcgatacaatgatgaccgacgtcgtgattatggcggccagcggcacgaaagtcgttggagcgactcccgcaggggaggcggcggtggcggttactccagcaatagtggtggaggcggcagtcgtggctacgacaatcgccgcaactacaacagcggtagcggtggccagcaaaattgggtgcagaacagccgcagaagcgggtacgatgatcgcggctatggtggcggtggaagcggcagtcgtggatacgacaatcgcaaccgtggatacgcaggcggcagcggtggtggtggcggcggcggcggtggtggtggtggtggtggtggtcagcaaaactggatgcagaacaaccgcagaagtgggtatgacgaccgcggctacggcagctcgcgggactatcgcgatcgagaccgtggcaacgaccgcagtcgaatgggcagtaacgaccggaaccggggcagcagccagagtagctatcgctcgggaggtggtactcatcaacaacgggattttcggcctggccaccgcgacaccaaagaagatagtcgcggtggctatgagcggtcagctggtcaatcgctacccaagtatggcaataacaccgctgtaggcggtggctacgatcagtacaagcaacaaggtggagcacctggcggaggcaaggcctcccttagcggcaagtggagtacgtacagtcaacaccatcagcaacagcaggcgccgcagcatcaacaaacgggcatctggcagactcagcagcagtcacaacaataccaacaacctcagcaagcagcggcgggccagcaacaatactgggcctataaccaaatgcagagttatggcaaccaacaggcctggcagagtgccgatccgcagcagcaacaacagtggatgtcctggtggcagcagcagcagcagggctctggcggagcagcggctgggaatgccagtggcggatcaggcgtaaatgtcggcggcggcgctggcaataatgatggcggtgccgccaatcattactggtctcaatattcgtactccacgcagtccaatgcgggtgccgacaagaagtagaatgcagcaacactatgcagccgtgttccaccaggcccagacccctctgcgttgtcccgaaaggagttaaccacaaatctgaactaaactttatataatagttttaaacgattaacgaacagtaaaacaaaattaatttagtttagccagtttgggctagtcgaaaccaaacaattgcgagggctaaccaaaccctaagtcaaaattcttaccttaccttcggatggattgtacaaaactaagactacatatatcatttgaaattgaacgtgaatgtttcgcttttcattttccacaacgcattttctatatgacagtgacgaagcaattgaatgaaacgcggtctttactctggcactacgtatctaggcagtacaacttgttttaacgtttattacgattattgttttattttttacaatcaacgcaaacaattgaaatgaacgcattagagaagaaacattaacgaataaatctatacattgaaaaaatc

SEQ ID NO: 254 - DNA, 2920 bp, Drosophila melanogaster
gtacactgagaacagtttacacatttgtcacactgcaaacatgtggagtattcaggccttggtggtgcatctgctgctgctcggttccatactgagcatctacttccaatcgaccatcttgtcggatctcgaaccgctgagcacgctgcgcgaattgggtttggaaccgccggcggatcgattggtagtgttcgtggtcgatggactgagggcgcaatccgttttggctgaccactgcagtgcagttcctgacctccgggagctgttcgttgaacaggcattggttggcatctcgcgggcttgcccacccactgtaactcgaccgggtcacatcgccatctttggcggtttcaacgaagatcctgctgcaacgctcacctggaatccgtccacttttgatagcgtcttcaataggagcaggaacgccataggttggatgcaggccgaagtggccaaggtattcactcacctgcccaccggcggagctccactgcgttttgaaaccttcgccagatcggacatttcggacaggctcagattggatcagtggacttttgacaaggtgcgcaacttcatgaccaatgaacaaaatgtgcagccattgcgggatgctacctcggtgatcttctttgtgtatctagccgatatcgaccttgccgagcatgtccacatgcccaacagtctgaatttccgggaaaagttaaactacacccaacgtggcattcggcagacctatgaactcttcgaaagcgttttcaatgacagtcgcaccgcttacctgatgacggcggattatgggataagtctgcacggtggtggaggtgagcgcggagtggaaaccccgttcatcctttggggtgctggtgttaagcgctcggcgccgaatcccggccagaatttcactgccggtgaaaatggtcccatcctgccattataccagctggaacaaattcagttggcgccccttatgtccgcccttattggcctaccacctccaatgaacaacatggccctgatgcctctcggattcctgaataccagcgttcagtacgaactgcaggttctccacctgaacgcgatgcagttgctggcgcaggccaggattctgataaagcgacatgaggacggtatactttatctgttgctgcccaaatttgaaagtctgggctcggcagagatagaaaactatccgcagataattaagtatctggtggccaaggaacagtacgaggaggcactaaaggtgagccataaaatcgccaagttggctcaggaatgcatggagtactaccatgggtactatcacctgcccctgctggtggccaccactgcctcttatctggtttggttttaccttctgctggtgcgactggcacgggagtcaaatcatccgaaatctgagcgtaagggctatctaacatggaccactttgatgatgtgcttgggaggattggtgctcctggagctaatgatattgcagagggtgccccacttgacggccttctatctgcttctgcccttcggaatcctcatcttggccctggctgaacgtccctgtcaggatagggatttaatgtgccagttcccagtccttcacctggttggaatcgttatgcccggtgttctactaatcttgatggccttccacaacagtcacatcgggctcctctacttgccgatagtgtgcctcaacaatcgtagagccttctttagaccctccttgaagttaattttctggcttgcacttgtcttcctgctgagtggaatcctgttggtcaaacagagcgcgagcctgcacttcatcaccgataccattggagtttacattggaaatagccatgtggtctacttcagcatgatcttatccatcattcgtcctctgatcctggggcatcagcactccacacgagtttggatcgtcaacatggccgctctactggttacagcctacggaatctatcaatgggatgcggatcagccagtctgcacctatgtgtatgctgcatgttggtcataccttctcttcgccttcctttcaatcccatatagtggaacaaaggatcttaggcgacgcttggaactgataatcttcaatatgctgacggtgcacataatgctgaccacttcaatcggttcgctctttgttcagatcatggtcacggagtttgtgctaggactggagctctacgaggagagcttcagttacgcaaatcttaaggatgcgattgcaaaccagcagcagaacaaccaaggattagaggagtctcgaaatgaaagtcctaacaatccgctggagcacgtaaggcaatcctatcgctatgcggcactgatactcctgtacctctatatatccttttttggaactggccactggttctttaactttacattcaaacccatgacatcgcgacttttctttccacaattccatctgcacatgcttgtggcctttatcctgctaaagatattcattccatcaatcattgtcatgtcgagcatatacgcattggtatcctttggccgaaagaatgtccggtctatcttcatctgcctgttcctgatgaacgacgccatgagcttgtacttctgctactttgtgatcaatcgtggttccttggagaaggtgcgagaatcgttagaccgcctcctggtatcccatgtctttatcattctgctgcttgtgtgctcctggatagccaagggtttcctggccaacacgaagaaggacaaacctacaccgagagcaccagtccaggctgttaccaataatgccaacttagctcaggacagtcaggcttagatcggtccggattatgtgccagaatatcaatttgcatttctatcttagctgaaatatgctggccctgtatcaatgatacacctataactccacaataaaataatatttttataccagtat

SEQ ID NO: 255 - DNA, 3715 bp, Drosophila melanogaster
agcggtctcactcacgtcgagctgacgcttattctgcttcttcttcatctggtcgccgcgcaatttttttatccggcggaatttgcaaatgcaatttctggcgtttagcgcattttaagcggagttaacgcatacacagtaacaaatccggcggcaatatgtcgagctttgtgctggacaaggaggcgttcgtgcgccgcgtgaaacgcctctacacggaatggagggctcccagcatcggacacgatgacgcgctcaggaatctggactgcatcatgagcatcgtgggcgtcgaagaggatgtcatgtactccaagtccatggccctgcagctctggctgctgggctacgagctgacggacaccatctcagtgttttgctcggatgccgtgtattttctcactagcaaaaagaaaatagaattcctgaagcagacgcagaacatcaccgaagaaggttttccggaaatcaatctgcttgttagggatcggacggacaaggaccagggcaacttcgagaagctcatcaaagccctgcaaaactcgaagaagggcaagcgtttgggcgtcttcgccaaggacgcctatcccggggagttcagcgaagcatggaagaaatccctgacggcgtccaagttcgagcatgtggacattagcactattatcgcctacctcatgtgtcccaaggatgagtcggagatcaacaacatacgcaaggcatcgctagtgtcaatggacattttcaacaagtatttgaaagatgagatcatggacattattgattcggataggaaagtcaaacacaacaagctctcagatggctgcgaggctgccattggcgagaagaagtacaccagtggtctggatcccagactcctcgatatggcctacccacccatcatccaatcgggaggagcctacagcctgaagttctccgcggtggcggacaaaaatcccttgcacttcggtgtgattgtgtgctccttgggcgcccgctacaagtcgtattgctcaaatatatcgcgcacctttctggtgaatcccaccgaggccatgcaggagaactacacatttctggtaagtgtgcaggaggagattctcaagctgctggttccgggcacaaagctgtgcgacgtctacgaaaagaccctggacttcgtgaagaaggagaagccgagtatggtggacaatctgcccaaaagctttggtttcgccatgggcctagagttccgggagaactccattgtcatcggacccaaatgccaggcgctactcaagaagaatatggtctttaatttgcacgtgggcatctcgaatctgaccaatcccgaagccaccgacaaagagggcaagaactacgccctcttcatcggagacactgtgctagtaggcgaacaatccccagccagtgtgatgactccgtccaagaagaagatcaagaacgtcggcatctttatcaaggacgacagcgacgaggaagatgtggacgacaagaagaccgctaaagaagatcagggcaccgagatcctgggccgcagcaagcgcaacgcggtgctggagtcaaagctgcgaaacgagatcaacacggaggagaagcgcaaggagcaccagcgcgagctggctcagcagctgaacgagcgcgccaaggatcggctggccaggcagggaaactcgaaggaggtcgagaaagtgcgcaagaacaccgtctcctacaagtccatcagccaaatgccgcgcgagccggaagtcaaggagctcaagctttacgtggataagaagtacgagaccgtcatcatgccagtgttcggcatccaggtgccgttccatatatccaccatcaagaacatctcgcagtcggtggagggcgagtacacgtacttgcgtatcaacttctttcatcccggcgccacaatgggtcgcaacgaaggcggactctatcctcagccagaggccacatttgtcaaggaagttacataccgcagctctaatgttaaggaacacggggaggtgggagctccatccgcaaatctaaacaatgctttccggctgatcaaggaggtgcagaagcgcttcaagacccgcgaggctgaggagcgcgaaaaggaggatcttgtgaagcaagacacactcattctgtcccagaacaagggtaatcccaagctgaaggacctatacattcggcccaacatcgtgaccaagcgcatgacgggcagcctggaagcgcacagcaatggattccgctacatctccgtgcgcggcgacaaggtggacatcttgtacaacaacatcaaaagcgcgtttttccagccctgcgatggcgagatgatcattcttctgcatttccacctgaagtacgccattatgtttggcaaaaagaagcacgtggatgtacagttctacacggaagtgggagagatcaccacggatctgggcaagcaccagcacatgcacgaccgcgacgacttggctgctgagcaggcagaacgtgagctgcggcacaagctcaagactgccttcaagagcttctgcgagaaggtggaaaccatgaccaagtcggtagtggagttcgacacgccgttccgtgagttgggattccctggagcacccttccgcagcacggtgacgctgcaacccacctcgggctccctggtcaatctgacggaatggccaccatttgtcatcacgctggacgatgtggagttggtgcacttcgagcgcgttcagttccacttgcgcaacttcgatatgatatttgtgttcaaggagtacaataagaaggttgccatggtgaacgccattcctatgaacatgctggatcacgtgaaggagtggctcaactcctgcgacatccgctattcggagggtgttcaatccctgaactggcaaaagatcatgaagaccatcaccgacgatcctgagggattctttgaacaaggcggctggacattcttggacccggaatcgggcagcgaaggcgaaaacgaaaccgccgaatccgaagaggacgaggcctacaatcccaccgacgccgaatcggatgaggagtcggacgaagattccgagtactcagaggcatcagaagacagcgaggaaagcgatgaggaccttggctctgatgaggaatctggcaaggattggtccgatctggagcgcgaggctgctgaggaagaccgcaaccacgattatgccgcagatgacaaaccacgcaacggcaaattcgattcgaagaagcacggcaagagttcaaagcacagtcgccgcgaccgcgaggaggctcgatcgtcgtcgcacagtaaaaagcacaagtcgaactcctcctcgtcctcttcgcatttaaagtcctccagctccaaacatggcagctcatctagcccgtcgaagtcgtcgaaggacaagtacaacagccgggacaagcatcattcctcctcatcgtccggaaacaagagcagcagcaaggacaaggatcgcaagcgctcgcgggatgacagtcgcgacaatgggcacaagtcgaagaagtcgcgacattagggagctgttcctgtcgccaagcctgtgtggcactccgttcgtaatctagctctcctgttaccattgtctatctgttaaaggacccgccaccccaatcccccgtcactcatttttgtcacgcttcaaaagttgtattacaaattaaatataatacgatacattaatataataaactaatgtaagaacta

SEQ ID NO: 256 - DNA, 6971 bp, Drosophila melanogaster
atgatgagggaatcggcgcatgatatcaacatggacacctggaatcagtggatcctcgaggccatatcaaagatcaggtcccagaagcagaggccctccgtgcagaggatttgccaggcgatcggcacacaccacaagttccacgaggacattgtggcagagaagctggaaaaagctgtcgagtcgggagccgtcataaaggtctacaacaagggactgcactcctacaaggcaccaatggccaagcgtcgcgtcaaggtggacaagaacactaatctgtacaaattggtggccaaggcggtccacgacctgggcgaatgcgagggatctaccatcaagagcattgagaactacattcagaagttcaactgtatcgacttgtcgcccaatgtggacttcaaggcggtcattaaggcttcgatcaagaaggccgtggatgccggctttctgatccaggaggggaagctatataaaaagggcaaatccttgacaaccccacggaaatgcgcacccgtctcggaggtggtcataaagggcgaggagtcctgcacccactgctcgggaaattcgcagaagaacctcaacggaatcccagagcccttgagctcctgcaagcagtgtgggatctcattgcacaccacctgcgccaacatcgccggcaggtgcaagtcgcaatcctacgtgctgctctacatgctcgtcaccaagggcactatctgggattgccagaactgcgcggactgcgccgtttgcaaaatgagaaatcggggcccgtgcttactgcagtgcttcgtgtgtaaggaccactttcacttaacgtgtcttgatacgattccagacaaaaagccgaagcatccatacaggtgtaagacatgctccaagcaaggctttgatactccgaagttggttaagaaagacaattcaagaattaaaatggaagctgagagaatgaccccctcgtataaatatgcctccaataagcgccaatccatcaaaaaggatggcaacatcgagagtccttcgacctcgaaactttgtgtctacaacgacggcaacggccagagaaggaaagtgcccgccagcttaagctctagaaaaatgaaccacagtgaggaccagttcgagttccccagcaagcaaaagaggtcgcaaatattacagggaggctacttggctagccaggaaacgcggaagcgaaccttttcggatctgtcctccacgagttcgtccagcgagagtgaagacgaagacgatgaggacgacgacaggaacaggaatggcgatgacaacgaccaagacgagagcacgtcgtcggattcgtgcacatcatccagctcagattctgactccagcgagagttccagcgacacctccgaatgggatgacgaatacgacgaggaagaagactacgacacagatcgcagcacgataagggagaaaaatgtctttgagagtggcaagcagagctgcgctaaacttagtactggcgatggcctaggctccccgcaaaacaatgaattgggtagcgagaattgggggtttgctgccgtggcaaaaaaccccatcgatatatttgtgaaatcgaaacataatagcaatgtcaaaggaattggttactccaagccagcagcaagcacgtttgccacgtcccccgcagccaatcgagtgcaaaagagcactccagtagcttcgtctactcccgaaaaaaactctgcaccgattggcggcatgacaattaagcgtcagactgccaatgggcagaagaaaaagattgttcccttgaagagcatgcccctcgaagcgggcaagtcgtacgaaaaatgcgaggacgacattccgtatctaacagaggagactgttatgaaagttcaactgctagaggagatagaacgcagcagagagacccacagccaagctgatggaaagcgggaaatgaacaacgacgaggatgcgcctggggaaagtacaaagcgggccaatccctttgagaaccagccccttccgcctggtgtcaccgccacggatgtggaattgtatcaagaggtgctccataaggccgtcgttcaaatgtccaataatcatatagagaaggtgaacgacgtaagcctgaaatccggacagaacacccagagtccaaagtcgattcaaattggaaagtgggacattgaaacctggtactccagcccctttccgcaggagtacgccaggttgctgaaactgtttttgtgcgagttctgcctcaagtacacaaagagtcgttctgtgctggacaggcatcagaacaaatgcatttggaagcagccgccaggcactgaaatattcaggcagggaaacatatcggtgttcgaggtggatggcaatgtcaacaagatttattgccagaacctgtgcctgctggccaagttctttctcgaccacaaaacactctactacgacgtagaaccctttctgttctatattctcactaagaatgatcaaagcgggtgccatttggttggctacttctcaaaggagaagcactgcacccaaaagtacaatgtgtcctgcatcctgacgatgccgcagtaccagaggcaaggctacggtcgcttcctgatcgacttcagctacctattgagccgagaggagggacagctgggcactccggagaagcctctctccgatctgggacgactttcctacttttcctactggaaatcagtcgtgttggagtatttgtacaagcatcgcaactacacaaagatcaccttcaaggacatcgccattaaaacaggtctggctatttccgacatcgccctggccttcgagttattgaacttcatcaagctaagaaagaacgatggcgacattaggtatcagattaatgtgaaaattgagtggaaaaaggttttggcccaccataacaaaatggcgaacagcaagacgcgaataatcattgaacccgactgcttgaggtggagtccgttgctgtcggtgtcgaaattacccaacataatcaagcccatttctaatcgtgaatatttgagcaaccaaatggagacaaattctagtttcaaggaaattaatgaagacaaaatcagcgtaaagcagggtgtttccacgtcctcaaaggtgaatcaggagtcttccgagttgtctaccaagaatcggggacccagctcggaaaagttaattgacgaaagggaaaaccagcgaaaacgtgcatatccggaggagttcttaaagtcagcgtctaatgaggcaaagaaacccaagttgactgcacctcagccgaacctcgaggatcagtctttcggtgagctctccgactcatcggattgcaaatcttctaaagatctttcggaacagttgaccaaaagagctcaaaggttggccaaacgcaacgacctcatcccccacaccaacaaaaggaagcatttcgaccggccccttgagaacaatactacttcaaccgaccataatccgccagctcaaagtcaagcggatactgcgggcaccgaaaatggccacaagtcggaagaaacggctgccaaggagaactgcaaaaatgttgtggaaaaggagcatgtcgacaagccagtcaacattatgcccaaactgcggggtaagcagtccaatggtaagcgttccgaggagcctcagttcaatgaaaatcctacatcagacccagtcgcagttgcctcgctgagtccagccaaggaaataactagggagccggttaaagtggcaaaaacggagagtcctggcaaaaaccaggagtcggccaagcacgatgctgaacccaatagcgtcagcgatcaagtgcttgatgcagtggccaagaagacgaaaaagacgttgttctctgatgtagcatcgtacaacactgaggatgtaaaatataattcagaggaaaagccaatggcaatcgcgcaagagccaaaagaaagtcccacggaggctggcataaaggagaccaagccgcttgaagttcctgagcagaaggccaaagcaaagagtcccgagaagccggcaaccgttgcggagacagtattgcagcacgtacatgctcctgtgaatacggaaaagatctccacggaagaaagtaaactggagttggatgtgcactacttaaagctttcgccggactccgcgctcaatccaccagtggcctcagtgcagaaaccagtgcccgagcctccagctccgaaggagaaagctaaagacctccaggccgctcagccaagcgaagccttgcagaagcaaccagaaatagagatggtcaaaaaaaccgaaaccaaaaccgaaacccctgtatctaatccgccatcaaaccgtactgatgtttcctctctcgtcgagcaaccagttaaggctgcgccagaaaaagtggagcagcctatggtcaaagaagctgtcgacatcaaagataaggcactcaaaaaacctgtgccagatgtgcctgtcgtaaagccagaggctactagctgcgaaaagaaaatcgatcacagcaagacgaaagtgtttcacgaaaaggaagccatcaaaaccgatcaacaactagtgcaggttaaggaggaggaaaagtcaaatgcgagagcgccatcggcacccattcccattcgggacaagatccaactaaagggtaacgaacacgcccagttgcagaactccattccctcccagttcccactgaatcagatgccgaactatcacacttcgcagtactggcagtgggaatactatggctacaatctctctcacctggacgcatcgcagaagggacagaagcagttccacaaggacctggccacgacaatggcgtacacgcacaactttacgcaaaacctttatcagtccgccaatctggccatgcagcacgcccatcaccagatgcaccagaccaaggagaagcacaaggtggagcgcaagaacagcggcaagaaggaggagcagaacaaggtggtgtccagtgtcaatgtggtcagcacggctcgcgaggatgcccatgtgcagcattgcaacgagtacgcggccaacaaccaggcggccttgtacaaccagaaatgcgcaagtcagcagaagcaggcgcaacaaatgaagtctctggccaatgtccagaacccagtgccccggcagagcaactccaacgcgccagagtcgacggttcttatgcctaatccagtgatttcccaggcgggatctgtgccggccaagcaaaaagtcgaacacggagtcaactcgacatcggtcatttcgcgcgagggaaagctcaacaagattgggcattctaacattcacgccaccgcccagcacgctaatcttcaagtgggaggcggccagtccgacgtcaacccgaacatggtttacaacacggagtcctcggcgaattcggccatgcagcactacgattgcggaatcagtgcccagatcaacatggactcgccggccaatattggctccgccatcgcgcacggtcctcaggagatctcagccacgtccaatgtgcacatgcatcagccgcacaggcagttctctgactgctccatgcagaaccagccggtaacgacgcccatgcacatgtccatccaaaactcccacatgcagcagcagaacaacttgaatttgaatctggcgccagaaggctcgtcaaatattaacctcttaagtaatccacagcaccagcaccagagcaggaaactcaatgcccaggcggacattgcagttagctcaccgacaccttcgcacagagccacgacgcccaagcaaattcggagcggaaatacccagcaacgcgacgctaagaacgcggcgccacccacaaccacaacaaatactcatcatcagattccccagggcggagcagcggcaaatatttccaagtcgcatcacgactccttgcacaacctgcagttctcgcagcacggacaccagcagaacatgcagcccatcgactacgtgcccatcccgcaaatcagtcagaacttctcggcgaatccctcgaactatgacatcgtgggcatgccggcggtgatccagcagcggatgtcactgaacggatcggtgcactcgctggccaattcgcaccagcgcatcgagcagccatcgtcagcgtgtgccgtcaataacttttacttgcaaaacaacatgccggcagctgagaacgcgcctcgtgtgccggtctccagttctctgggcggtccgccgacggcgggtaacaatgatcagcggcaggcaggtcaggactcgataaccacggcgaatagtagtggcgcaacagcttcgctggcgggcaatctgtgtagcctgtccaagctgcagcagctgaccaattgtctggagagccagccgtgtaacacgtcaccgggggcccaggtgaatctggcgccctctccgcaccatccaattccgcccaactcgacccctccgccgcacctgctcatgcagaacagaaacatctccacgccacccaacatgctgcaaacgcaggtaacgccgctgcagtacaagtactatccgggcaacatgaacatcccgccaatcacgtcggcgcaaaacacgagtcggaacacccgcaacacaccctccgccccggtgcagcacacgtcgacgccgatgggcagcggtaacaataggaccgccaatgtccacatcagcccgaacctgatggccccatacggagcgatcaacagctaccggatgtcgccgcagcaatccccgcccactggaagctacagctcgggaggcgactaccccaactcgcagattccgatgcagatgatgaatatgcaatctcagtaccaggatgcctgcgtgctgcagcgaggcactccatcgaacccgatgtaccccacgtattccccctacttacctctcaacggttctattcgcagataatagatgcgcacattttatatgttactttattaagtatgcctgtacataaatgtgtgctgtaaataaatatatattacgtcaatttaacaatccaa

SEQ ID NO: 257 - DNA, 5087 bp, Drosophila melanogaster
attaaaagtgcgtttctcggcgcatttgcagctaatttgtatatacagtgtacatagagatgagcacacaaactcgttcaggcggcgggggaggcggcggccatgcccgcaaccagaaaaagtcaaatgccagcaactccggcggaggaggaaccggccatcacgatggagtctcacatgctgcggccgctggcaagaagggaggccaggatgccagcaagacagacaagccagagaaggcccagcccaaggctaccaccgaacagttgcgcattgcccagatcaccaatagcaccacagaggatccgcagatcaacgagaaggttctccttcttttgaccatgacccaacgttccgaggaggaggtctgctgtgccctcaacgagtgcgattacgacctggaggccgcggccaacttcttgatcgaggagctaccgcagggcgcctttgccaagtacgagaaaaagcgcaagaacaaggctgcaaataacacggctgatggtgctgctggcgatggcgattgggccgatggcaatggcaatgcggacaggcgggaaaagtcgcgaaaccgcagctcaaatcgcggaggcacccgtggctccagtgacagtcgtggatggcgcggaagagagactcgtgagaatgagcgcaaccagcgcgaatctcgcgaaccttggtccgggcaaaacgctggtcaggaccgcggtgacgatcgggcaaatgacaactaccgcgggcagcgcaacggcggcggacgcagtggtcccggtggcggtggacgcggtggtggctttgtctctcgctctggccgtggcggcggccgcatggggggacgcaccggtggaccgcgtggcgatcgcggcagcggaggccctggtggtgcttatggatcaggtcgcggtggcaatgcaaacgaggatcaccacgaggttgagctgtgggacaacaccattgcccaaaatgccgagaagcagcaacaggctcatgacgatgcctggggcgactggaacaacgaggagtacgagggctcgctcaaggacagcaaggtgttcaccactagcaacctggcaacgcaatccgctgccaacgtggttagcggaactggcgcgagtgttacagctgttcctgcggcggctggaaccgagatatcggcgccaccgggccttgaacatcagttggtgcagcagggatctcatctggaggagagctccagcagcggcccagcggcggtcacaccgccagcaacgctgagcggctcggcgaccacgccgctgctgcaatacagcgcagcggtcagtaatccaccgccccagctgcagtcccagggcacacagtcaggagcgggtacaggagcgagcgcagctgccggcggaggagcaggcagcacaccgtcatcctttgtatccgcctctcccgacacattctcaagcgccgcctcggcagctgccacgctggtgcatcaagcacaaaagcagcagcaacttcagcagcagacgacgcctatcaagccgtcggctactttgtcggtcgagcaatctcagtatttcaactcgttggccagccagggcgtcagcccaggttctgttccagtgcaatcggcgccagcgggttacgcgcaaaaccccgtggccgcctactcccaaactagcactagcgtgggtgtgagccagtaccccaatacctatgccaacgtattcgcttctggaacggcagctggagctggcactgccgagcaatcgcagcagcaaccgcagatacggagggcacgtgttaagctgccaccaccctcgaagattcctgcgagtgccgtcgaaatgcccggagacaatgcactgaacaacattggctacctggacgtgcagttcggcgctctggacttcggcacggacgatggcttcgagccattgccggagaaggttggttcgggctttagcattgatggtcagcagcagcaacagcagccagatgactaccagagcaagtcccagcaacagcagcaggtgacgctagcggcaggtctacagagttcgcagattagcgatgccttaaatgcagcgggctatacaagccgttcgacgtcacagcagcagcagggcgttagctcagcggtgaatgccacaatcgatcagctgaccaagagcgatccctacggacagacgggcggcagtggtaacgcctaccaaaacgcgtaccagagcagtggagcgagtaagacagccagtggctttccgacgaccgcgcccggtggctacagcagctccacatacgcgaatgtgcaaagctcagtagccaacagttaccagcagcagggatacggctcataccagcccagttcctaccagcagcaggctggcagcggggctcaaagcggtacaggtgcggtaagcggaggcggaggaacggcgacgcaaaacattccggttggaggcagcagcagccaaaatagcacgagcggcaatgcgagctctgcctacctcacatccggatattcgacaccacaaagtgcttaccagtcaagccagagtgtttatggcaacactggactgtccaacagcagcgggttctctggcagtgcgagcaacgcgtcctcgcagtacgccaatttcagtgccagcgccaagctaaaggatgcgaccacggccagtagcgccgctcattacgacagtgtctcaaccagcagcggagtgagcagcaacagcggaagcacaggcaatggcggtgtggtgagcggtcaaacaggtgctaaccaggcggctgtatcgaacaataacagcgtgagcggcagcagctcggtcagcaatgtgacggcaggcgttgcgagtggcaacgtagctggcgtgggcggaggcgtaagccagagcggcgtaagtagtggagtcggcgtgcccggtggcagcgcgtccagcgtcggtgtgaatgtgaacaacaacagcagcagcgccagctcggtgggagcagcgaccgttgcccagacagccacgggaaccaccgctgcagtgctggcctcgctgaccaacaagaacaccagcagcagcaatagcagcggcagcggtggcagtgctgccacgacgacgggcaacgccagcggacaaggtgcgggagcaagcaccggcggcgtgggcagctcgtcgggtgctggtggtgctggtagtggtggtggcagcggtagcggcttggtgcccaccaacatccaaatggttagtcaatatattcagactggattgccatactatcagcaaccagtgtattcctacgaggaattgcaaatgatgcaacagagagtgccacatgtgcagggatattacgatctgaactatccgccggccagtttaggagctggacgtgacaacctcggctctgtgacgtattctgctatgaatgatggacgctttgcccgcactgacaataactccagtccggtcggcaatgtctccagcacaatgtcgcaacaggctggctcaagtgcgcccatgctaaatgttccttacgcctacttctatggtggcaatgtaatgcccggtagttttcaatatggcacgcccgccatatatccacaaataccggcagcaaacactgcctccggtcaacagttcccgaagccttcgtatagcgcgggctacggctcgaccagctatgacactctgtcgcagaccacgcaggactacagcaagggcggctactcgtcgagcgtgaatcagcagagcaaaactcagactgtgtccaaccagtcgcaggcaggcactggatccgatctgacctcttctatgtacggaaaaggacacgtggcgctgaacaaggttaattcgtacgagaagcagagtttccattcgggcactccgcccccgtttaacatgcccaacactcagacggctggaggcacctctgcccaaccgtacggcatgtacttgccgatgccagcggccggacaccacaatatgatccatcagcccatccaccagatggacggcaggattcatagctcatcccgccgggactcgaacagtgccgggcagcgtcaacagtcgaccagccagtcgaagtctgctggcaagcaaggctactcgccctcgtactgggccggacagaactagcttccggagaacacgatctggcggcccctgcagatcgcccgcgcgaacgacttttatagccttcgcagcaatagcagcagcaccacaacaataacaacaacaaccaccaccaccacgcccattcaccacatctacagcaagagcagcgccagcaatgcccggacgctgcccatcacactcggaaccaactcaaaagtgaccacaatagcagccagcaactccacaacgagcgtggatgccagcaacacaccaacagcagcaatagttaagacgacaacatcggcgatgccgggcattcccggccagttgctgatgctcgtcaaggagcaacagcagccacaaccacagccgccaccacaacaacaacaacatcaagcactcgccgacaaggtggggagcgagaaatcctcgccagcgtcggagaatgattatctaatatacgatgataagcgatcatactttacttaataagaaacgtttttactacgaacgcactgtaaaggcgccgctcagcagcgtcctgaccaccacgcctccctcctcccctcagcctcaagacacaccacaccccacacttgcggaggcgactcctaaagccaaccacacacacaacacacttcctcacacaacaaagagtagaacgaaacatacagcaacatccgcataaatataccaagtaccattttcacattgcatacaaataaatttacaaagataaagagtaacaattattaattattaaaggcgtaaaacgatttaacagatttaagagtgtaagagagaaaccggaaatgcagaacagtaaattaaaaatacaagtatatatattaaataaaccacaaaaccacaaacataacgtgaatgagaaaaaacaaaacaaacaaaaattaattattgtaatcggtttaaacttatatgtataattataaccttaatatttaaactaaatacaaaaaagaagatacgattaaatccaaacaaaatgcaaaaaatgaa

SEQ ID NO: 258 - DNA, 4374 bp, Drosophila melanogaster
ggtaacacttagcagaaggcgggagcgtgggtacattgagcatcagtcgaccaaatcttcagattagtttgtagtttcatcccaaaacagtggtctgacggcattttaagttagcattgcacccgagttagcccgcctcatcacagttttcagcacgatgactcttccgcaagcacagctggactttttcacgacggcgaccagtatgctggaatggcattacaatctggagagaaataagccgggtctgctggaactgaccggcgttagccagcatgggcgggccacgatgagcggacttaatgactacgattaccagagcctgtcgtttttgaaatcggatagaacacataacctacaacaaatgcgaacggtgaccaagtcggctattcccaacgagattctggagcactttaagcacataaaatgccactgcaccatgggcctctttccggaaatcggacgtgcctggctgactatcgattcggaaatctacatctggacgttcaatcagacgagggatgtggcgtactacgatggcctcagtcatctgatcgtaagcgttggcctggtgaaaccaaaacccggcgtctttgtgcaggacgtcaagtacctcctggttctcactacgcccattgaggtcattgtcctgggcgtgacattcggtgagagctcgtacaacgaaatgcagctgatgaaccggccagtttttgtgattggtaccgacaacgtgtccatcagcgtcatcaaaggaacggatgacggccgcatctttttgggcggtcgcgatggctgcctctatgaaatttactatcaggccgagtccagttggtttggcaagcgatgcaagaaaataaatctctcccaaggactggtctcctatatggttcccagttttttgaaggtcttttcggaagtggatccaatcgaacacattgagatcgataacagtcgcaagcttctctatgtccttacggaaaaaggtgtcattgaggcttgggacatcagtacgagttacacgacagctcgaagactaggtcggattacccagaacgatattacgaatcaagcagttagtctgatcacgactgtggacccgtccatttttaaaagtgtgaaagccatctgccctctgagcgccgacgatgccgacaaactacatcttgtggccgttactcagtgtggtgtgcggctctttttctccacaacatcgctaaatgtgaagcaacaatttggtcccgcggttccttgcagtccaggtgagaatacaggattcggtcagccagcagttcagccaccactgtctccaaatgctgaggctcctaagggactttatctgctccacgtgcgtctaccacccggctacaccccaaatgccaccaccaacaaaccaaagcaggtccatgccgctcactacacggagggaaccatgttgatgatcacaacgcaacagcatgaacaggatctcctctggtcgctcagctctgccccatcggttaactttacctacctggtggagtcgacggctctggagagcctggatggagttgtttggggattggctgaggtacatgaaccgtcgacgccacaacgaaagtcacccttaaatagtgcccgacacgcccgcaaagtagccctgctcaccaaccaaggcacacatatcatagaggtgcttaaaatggtggacgtactgcgtcagatccttctgtcgtgcaatggcccacaccacgaggaggtgaagatgttcttccagtcgcagaatcagcgagaggcatgtgtcacggctctgctgctggccacatcggatacttatcgtggcagtgacgttgctttgtgggccgcccaggcgtttatgctgtacggcggagagccatgctatcagcatcaaaagttcctgaacgccagcaaccgcaatatggctaatcaaactctaggcccgaatacgacgaatgtaagggagcgtcaatccatgtttatgtccacgccaatgccgaatagcgtggcaaatagtccggttggttttcctggatcgcagttcaatcagcccataagtccaattggaaatatgcagccaccacaggtggcagttagtaacgagaattccccaatcgttttctcggccaaacacgacggactttacatgtatgtctcccgcatgctgcattctgtttggcaaatgcgctgtgtaaatgagcaattttgctctaatctaagtcagagtgagtgtgccctcttgctatccgatctgcgttccctgcgtagctttctggaagtgcactctgtgcacgatatttcctcgactactcgagtgtcatttgataaccatttggatagaaccaattcatataacaccatcatgatgggcaacactttgctgccaattcctgagcaacgcgtattgtccgagcaggctcaagtagaggaaacacgttcgctttccgctctcaacctatttgtcaaacatgcatgtgaggttatatcgctgtggaacatcctaaactcgcattccttccagctgatatgcgtgcaactcagtccggaacatcagaagttgttgacatgctccaccttccgggatcttctgattacacgttcagaggtctgcgcattcttgatcatctcgctgatcaatctgtatctgaaggacgcggcgggagtgtctgaagtgtccaagaacttacgtgagaactgccccaacctatacaggcatgaggatgacgtgacctacaaggccaccgagttgttgatgaatgcaaagaattgcacttcggcaaccgaaaaggaacatatgctgcgaaccaccctgcatatgtgcaaggaagctgctcccacattgccactgcatagtatttgcatgcaattcatatcggctgacttctttgagggagtgatcgagctttcggctgtttgtgcctcaaaaagtgatccagaggaggttggtgttcatttctataacaatggggaacccgccgatgatcgcgagggttacacttgctttgccacaaggatggcctactacaaggaagtgcaacttatgctggaccatatctaccagagagtatgcaacaagacgcacgttcaggataagtctataaatccacttaaaggtacggctaaagcgtccgatgcaaaaaacggtgctacgcaaacgattccaaaaatagtggcccataccctaaaggtgaaagacccgctcattcatataacgctctacgaatggctgctggcccacgacatgctcaaagagcttttagacgtggttgagccgtcattaggagagttcttgcggcgcagtgtgtcgcaaaatgtagataatgtcgttcttatcgatttgctgtggaagtactacgaaaagaatagccatcattcccaggcagcccatatattggacaatttggctatgacacgcagtgaaaacattaatctggagcagcgcattgagtacttggtgcgtgctgttatgtgtatgcgaaatggtaacgttggctcttcattaagcaatggaatattcctgaaagagctagaggataagctggacatcgcacgagttcaaaaatcagtgcttgccgcgatgacagagttggctagcgataagctggaggcagctacggctgttaaggaactaaactatgcgttgtacgacataactcagctataccagcactttgcggagcccttcgacctttgggagtgccaattgtccatactcaactgctcgcatcacaacgaccccctactgatcgagtccgtttggggccagattatcaacagcgttgtggataagccgggcacaactagtgagcgctgcaataggttattcacgaaaatcgaaatcttggtaagggagtatggcgagtctggagtttgctttccctttgcctttctcataagggaactggaagttaaagcctgccaactgcgatttcccgagggcatagtgccggaaaaactggtgagtatgaatttggacattgaactgctcctggaatactattcgagaatgatttcaatgaacgaacgagtgtgggccaacgagggtaatgagtggcatttaatacaatccgtcatacgagtggtctcgcttctggcagacaacgcacaatctatttggtaccggtcaaaacgacgaattgttggcaaggctcaagacatagtggccggctgcctgaatatttgctaccaaaagcccgacactaatcgtcttcaacattcactcaaggaacttcagagtcagctgcagcggttgttgatttaaagccgtcggcctgcgttattttaattaaatttttgaaagtgctggactagacgttaagtttgactgagatatatattgtatttgtattaaacatgttaaataaattgatttccccacag

SEQ ID NO: 259 - DNA, 4824 bp, Drosophila melanogaster
atcgtaatgtgaatttttttgagagaccgagacgtacatacttttgttgctgccaaagtggatgtggacggaggaaaatagtaatatttaactgcgttgcgggagcgggacaatcgtcgtttgccaattgcggccaccgcttatgtcggctaatcggctatcaataatattagtaatcgtatcaatatcaagttacccattacccatcgcggatacacattagttttgcgaagggcagagcagcgcagagcatatagcgaatatttccatttgttgccaacaagactgtcgttgttgttgttattattgtggcttttcagtgactggggagagcagtgggggtgcgttcgtaatccttgtgaaaaatcggtgaccgttcttcttaaaaaaaaagcgaaagaaaaaaccatcgcgataagaaaatataagaaagaaaaatctgattgaaaaccaaagagctgctgctactgctgctgtgcgagtgagagcggtcgagaggtagctagtgagcgagtgagaaagctatgtattgcatttgcatttcgttgtgtgtgtcgtcgttttcgttcggtaaaagtcggtaaaaagcagagcctttccaaacctaaccactttcgggtaaacggaatcggaaaaggaactgggaaaatcgaaagaaattaaataataatatgcgttacatcgatggcaacaacaacaacaacagcagcgaccatcagctagcgactcctctctgagcgagagagctaatagcttttcagctttagcttttcttgggccaatcggaaattgtatttcattgatgtgaaggagtaccacggatgatagaaacccattgggcatttgactacttttaagcaccgaaacctgaaagactcccgaaaatactcgaatctcacgtgcagaatctctaagaatccctattggactgtttaaaaatatgtcgacagcaatgcgcaccacactgcagtcagttcctgaggccctgccagcggatagcgtgtccaatggcacagcatccaatgtagcagcaccggcggcgccagtatcgagcgcaacaaacgcggtgccaccactggccgccgtctccagcacaaccgccacctacgccaccaactcgatcagcacatcctcgcattcggtcaaggatcagcagcagcaacagcagcagcagcagcatgattcggccaatgcaaacattgtgtcactgccaccaacgacaacgccagtcgccaacactaacacaatgatgcccattgtaacgtcctcgaattcggccaccagcaatagcactgcggccacgcccacgccggcctcgggggcggcagcgacaggtggagtgggatctgtttcccagggtccagcgaccgtttcggcgtcagcggccaacaccaatcactcgcaccagcacagccaccaacaccaccaccatgtggccaacaacatgaccaccgacggtgcccgcttgtccagcaacaattcggcggtggtggcgagctcagcgattaaccaccaccatcaccacacccccggcagtggagtggcgcccaccgtcaacaagaacgtgcttagcacccactcggctcatccctccgcgatcaagcaacgaacctcgtccgccaagggttcgcctaacatgcaaatgcggagtagtgctcctatgcgatggcgtgctactgaggagcatattggcaaatacaaactcataaagacgatcggcaagggcaattttgccaaggtgaaactagcgaaacacctgcccactggcaaggaggtcgccatcaagataattgacaagacccaactcaatcctgggtcactacagaaactctttagagaggttagaataatgaagatgctggatcaccccaacatagttaaattgttccaagtaatcgaaacggagaagacgctctatctgatcatggagtacgcatctggcggagaagtcttcgactacctggttctccacggacgcatgaaggagaaggaggcgcgagttaagtttcgacaaatcgtctcagccgtgcaatattgtcatcaaaaaagaataattcacagggacttaaaagctgaaaaccttttgctggacagcgaactgaacatcaaaatcgctgactttggcttttcgaacgagttcacacccggctcaaagctggacacgttctgcggtagcccgccatatgcggcaccggagctgtttcagggcaaaaagtacgacggaccggaggtcgatgtttggtcgctgggcgtcatcctgtatacgttagtgagcggttccctgcccttcgacggctccaccttgagggagttgcgtgaacgcgtgctcagaggcaaatatagaattcccttctatatgtcgactgactgcgaaaacttgctccgcaaattcttagtactgaatcccgcaaagcgtgctagtctggaaacaatcatgggcgacaagtggatgaacatggggtttgaggaggacgaactcaagccctatattgagcccaaagccgatttagccgatcccaagcggatagaagctctagtcgcgatgggctacaatcgatcggagatcgaggcttcgctctcccaggtgcgctacgacgatgttttcgccacatatttgctgctgggtcgcaagagtacagacccggaaagtgacggatcgcggtctggctcctcgctctcactgcgcaacatctcgggtaatgatgcgggcgccaatgctggtagtgcgagtgttcagagtcccacgcacagaggagtccacaggagcatatcggcgtctagcacgaagccaagtcgccgagcctcgtctggtgttggaccgacaaatgcggcagcaacagttgcggcggccacgggagccgttggtgcggttaatccaagcaataactacaatgctgcaggatcagcggcggatcgagcatcagttggcagcaactttaagcgacagaacacaatcgactcggctacgattaaggagaacacagcgcgactggccgctcaaaatcagagacccgcttcggccacacaaaagatgctcaccacggcagacaccacactgaacagtcccgccaagccgcgaacggcaacgaagtacgatccgacgaatggcaatcgcacggtcagcggcacaagtggcatcattccacgtcgctccaccacgctttatgaaaagacttcgtcgacggagaaaaccaacgttattcctgcagagacaaatctgttcgatcgacttagaatggcatcggctgttaaatcaagcagacactttccaaggaatgttccatcacgttcaacctttcactctggtcaaaccagagcacgaaacaacacagcgctggaatactcgggcaccagcggtgcctccggcgactcctcccatccgggtcgcatgagcttcttctccaaactctcctcacgttttagcaaacgtcccacaatcgcagacgaggcggctaagccacgagttctacgattcacatggtcaatgaaaaccacatcgcccctgatgcccgatcagataatgcaaaagatcagggaggtgctggaccagaataattgcgactacgaacagcgggaaagattcgtcctgtggtgcgtgcatggagatcccaatacggactcactggtgcaatgggaaatagaagtgtgcaagctgccacgactctctctgaatggagtgcgcttcaagcgaatttccggcaccagcattggcttcaagaacattgcgtcgcgcattgcttttgacctcaagctgtgacttaaccaaacgaacaacgaggggaatgcggccgccaccgcctcgcggcccactgatccaactgacaccatgaccaccaccaattgtcggaggcctagcaacgacagcacctcccggctgtcggagctctctcttctatgccgctcactaaccagccagcagggctcccagcggcgtaagaagagcaggctgtccacaggtggtagcgaggatcagaaaaaatcgaactcgttgctgtcggcgttccaaatgtactctcccttcagttccaaggagaatatgcagtccagcgaggaggttgaagatctacacgtgattgacacacagccaggtcactccgtggatgtgccactcttcgctgactttagcccaataaatccgattatggaagaggatgctgagggcgttgaaggcggcaaaaccagtgaagccaaagtcattagtggtggcagtgggcaaaaggtcaaaggcgatggcggtggcggtggtgggggcaatcgattgaagaggaacatcaagcacaccgggagcctgattgtgcgcaaactaactgccggaaggcacaatgatgcggacaagaagggtgcgattaggaagaaggataaggagcagcaggaggtggcggacacggataaggagagaccaaccagcaagccggagggcaaggtagccatgctgcgcaccacaaccctctaatggaatggaacgagggcgtggcatgagcagtttgtatctattgaatgagtgaatatgaaggcaatgcggcgaataccctgctggaatctcaagaaataattaatgttagcatctctccgtagatcgaacgtattgatatattactacacattacaatcaagcagacaaactcctctatctatccacactgacatgcattagcacccgcatagatacgcacatatttacatacgttatttattaggaacctagttaatgggccagcaatatatgtcatcgcgcagcttgcaagatggaacagaagtgaatatataagggtaacaaacacaccactcaataaaaccgtaacaataaatattaacaagaaacca

SEQ ID NO: 260 - DNA, 2235 bp, Drosophila melanogaster
aggcaatcgactcgcgctgtaaacaatcgacgtcactaaccaacgtagatgaaaattttttagtacgtcgcgagtaaaacgtgcattaaatgcaataaaagggcagctggctaaggatcggaacgattgaagtcagccaacctcagaggggtgagcaaccgaggcagtgaatccgcgaatccgtgcatccagctgaccaaagggcgagattagcccagcaccgagtttccatccgcacacggacacggcgcacacacacacaggcacacgcagcccgtgcccatcgatgaaataacatacataacgaacgtataccgaaaatacacgggttacgggaaatagcagttgctgcaatcggcggataagcgaacttcaggaagctgagcaagcgggcccacaaagatgtcggatatcatgaacatcgacagtatcatctcgcgcctgctggaggtgcgcggtgcacgaccgggaaagaatgttcagctatcagagagcgagatccgcagcctgtgcctcaagtcccgcgagatattcctgtcgcagcccatactcctggagctggaggcaccgctgaagatctgcggcgacatacacggacaatattatgacctcttgcgcctgttcgaatacggcggctttccgcccgagtcaaactacctgttcctgggcgactatgtcgatcgcggcaagcaatccctggagacgatatgcctgctgctggcctacaagatcaagtacgcggagaacttcttcttgctgcgcggcaaccatgagtgcgccagcatcaatcgcatctacgggttctatgacgaatgtaaacgtcgctacaccatcaagctgtggaaaactttcacggactgcttcaactgcctgccggtggccgccatcgtggatgagaagatcttctgctgccacggtggcctgagtccagatctgtcgtccatggagcagatacgacgcatcatgcgtcccacagacgtgcccgatcagggactgctgtgcgatctgctgtggtcggatccggataaggataccatgggctggggcgagaatgatcgcggcgtgagcttcacatttggagcagaggttgtgggtaaatttttacagaagcacgaatttgacctgatctgtcgggctcatcaggtagtggaggacggttatgagttcttcgccaaacgtcagctggtgacgctcttctcggcgcccaactactgcggggaattcgacaacgcgggtgccatgatgtccgtggacgacacattgatgtgctccttccagatattgaaacccgccgacaagcgacgatttgtttatcccaactttggcagctcaggacgtcctttgacaccgccacgcggagctaacaataaaaacaagaaaaaataaacactgcacacctcgaacgaagcacaacaacaacagcaactacaaacggccacacacacaaaacacaaatagggaaaacagaaaggagaatccgtgtgtccacattcaacggaaagcgcagagagtttgtttttatcataaacgtgtaatcgaatcgtgagcaacgttatatggggaatatgaatctacacaaattagcctatctttcatttgaaaaggaaaaaaaaacaaaaacaaataaggaaaacgaaacgaatgaaatgaaattaagaaaccagaaaacacaaatcgagacactttagttcaaactaatggtagtgtaagacactgcataagcaagaatattttatctcctaatgtattaattttgttataatatttccttgcgcaaaacccacacactcacacacacacacacacatacacatgctcagatcatccgtacagtaggtaccataagtgcacgcaccggttgtattttaatttgcatttccaactcgcacagcattttaattatgtatgccgatcctggcggcacctttggcaaaggtctttaaccacacttcccttcttccttgttttttttttttgcgtatctaagggaatattagcaaatggtaacaatgttaaattttatgttaattaaactgtacgagaatgcttttaaatgtgagttgaggttactacatattacatatgtatgtactcgaagcacgatttatttttgtaatatttgacatcgatacatgtttacttagttttaaaacgaggaaagcaattttagttgcaagctacaaaagcttgaattgtttacaccaaaaatattaaaataaacaaatattgtgaata

SEQ ID NO: 261 - DNA, 2349 bp, Drosophila melanogaster
gcaacgccgccgcacgcctgcagccctggtaactctattttctattgagcaccgacaacgttgcgtgtataagacagtttacataaattattatttacaattgcacagagcgttgatgttgtgcgttctaagcgaaaagaggagagcacatccaaagagccaaaaagagtcagaaccgattgcgtattatggataacgaggcgttagatccaacaataaaaagcagtacgtcggcagcgacgccaacagcagcagcatcagaaacgacaacaacagcagcatcttcagttgtggaaaccacaacaacaatcgcggcggccacagcctcagcggcagaatcaaaaaacgaaacaacggccacaaacaacaatagcaacacaagcggcagcatcagcagtagtagcagcaacaatatagtcataccggcatcggccactaacggtatcaaagagagtaacagtaacttaagtacaacaacaacagcagcagcagtagcggcagcaacaactgtagaaggagtagctccagcaataacgtccacaatcgtggtgaccggcggcactcctccattgagcagtttggctaacaaactcaaggacaacacaccaccgtacgatgcaccgccgcccacgccgatcagcaaggtcctgaacatcaccggcaccccgatcgttcgcaaggagaagcgccagaccagcgcccggtacaatgcctccaagaactgcgaactgacggccctcattccgctaaacgagaagaccgccgccagtgaacgtgaggagctgttcatacagaagatccagcaatgctgcacactgttcgacttctccgagccgctcagcgacctcaagttcaaggaggtgaagcgggcggctctgcacgaaatggtcgatttcctcaccaaccaaaatggcgtaataaccgaagttatttacccggaggcgatcaatatgtttgctgtcaaccttttccgaactctgccgccatcgtccaacccgaatggtgccgaattcgatccggaggaggatgagcccacgttggagtcctcgtggccgcatctgcaactcgtttacgagctgttcttgcgcttcttggagtcaccagattttcaaccaagcatggcaaaacgttttatcgaccatcaatttgtattacaactattggatttattcgattcggaggatccacgtgaacgtgatttcctgaagactgttttacatcgcatctatggaaaatttttgggcttgagagcatttattagaaagcagatcaacaatgtcttttacagatttatttatgaaacggagcatcataatggcatagccgaattgttggaaatcctgggtagcattatcaatggctttgctctgccgcttaaggaggagcataaacaatttttacttaaggtattgctgccattgcacaaagccaagagcctctcggtctaccatccgcagctcacctattgtgtggtgcagttcctggagaaggatcctagcttatcggaggcggtcatcaaaagcctacttaaattttggcccaagacgcacagtcccaaggaggttatgtttttgaacgagctggaggagctgttggacgtaattgagccggccgagttccagaaggtgatggtgccgctgttccgccaaatagccaagtgcgtctcttcgcctcatttccaggtggccgaacgtgcgttgtactattggaacaacgagtacattatgtcgctgataacggataactcggcggtgatattacccattatgttcccagcgctcaatcgcaactcaaagacgcactggaacaagaccatccatggtctgatctacaatgcactcaagctgttcatggagatagatcagcggctttttgacgagtgcagcaagaactacaagcaagagaagcagatggagcgtgagaagctgtcgcaaagggaggagctctggcaacaggtggagagcttggccaagaccaacccggagtggacaaaggcgcgccggtttaacgactgcctgccggtcagcgacagccgggccctgtgcgatcaatatagtgagaacagcgattcagcgtatgatcagagcgagcagagggcgcgccagccgccgcctccgctgccgccacagaaacaggcgcaccaggagccccgagaggtgagacaggcacttgccacattaacaacactaaacaactactaatccgccacgtgtgatcctggcgtcgctgtgagctgtgcccagctaaggcccactctgtttcaactctaattctaatcgaacgaatgtctgttaaaataatcacactcatgtcatttaaaaaaaaaaaaatacatatttgtatatcttt

SEQ ID NO: 262 - DNA, 2556 bp, Drosophila melanogaster
gtgatgtacaatcgaactatcactcggtatcgcactgcaaataccgatagtatttcgcaagctcaaatattcgatacatcgacactgtcgtgagttgtccagctctagttctcctctgaaattaaccagccgcctgataaccaaattaaaagttattaaatcggaacaaatcgcagcaaagtgtgcacaatgagcgagcagaaaacgagtgggagtgggtcggcggccgctgcccgtctgcaaatcgaggcggagtacaaggacaaggggccgcaatggcatcgcttctacaaggaaatttgtgagacctgcgaccgggaggcgaaggagaagcagttcagcacctcggaatcggaacgccacacgaaccgcggcctgaatcgctatcgggatgtgaatccgtacgatcattcccgcattgttttgaagcgcggcagcgtagactacatcaatgcgaacctggttcagctggagcgcgccgagcgccagtacatcctgacccaaggaccgctggtggacacagtgggccacttctggctgatggtatgggagcagaagtccagagcagttctcatgctcaacaagctgatggagaagaaacagatcaagtgccacctctactggcccaacgagatgggagccgacaaggccctgaaactgccccacgtcaaactcaccgtggagctcgtccgtctcgagacctaccagaactttgtgcggcgatggttcaaattaaccgatctcgaaacgcagcagagtcgtgaagtgatgcagttccactacaccacatggccggactttggcattcccagctcgccgaacgcattccttaagttcttgcagcaggttcgcgactccggctgcctcagccgcgacgtgggtccagccgtagtgcactgcagtgccggaatcgggcggtcgggcaccttctgcctggtggactgttgcctggtacttatcgacaagtacggagagtgcaatgtgtccaaggtgctctgcgagctgcgcagctaccgcatgggcctcatacagaccgccgaccagctggacttctcctaccaggcgatcatcgagggcattaaaaagctgcacgatcccacctttcttgacgctgaagaacccctcattagcaacgacacagagactcacacactggatgagctgccgccgccattgcccccacgcgtccaatcgcttaatctgccactggcccccaattccggcggtatactttcgctcaatatgcgcgcggcccaggctaatggagctgaaagtatcggcaaagagctgagcaaggacgccctgaacaacttcattaatcagcacgacatgatccacgatgccgaggtggccgacagtcgtcccttgccgccattacccgtaagggctttcaacgattcggacagcgatgaggattacttgctggatgacgatgacgaggacgacaccgatgaggatgaggagtacgagaccattaacgagcacgatgccgatccagttaatggacacgtgcccgcgacaacacagccacatgccgacgatgttaatgccaacaacgagaagccagcggtgccagtcgacgagcagcacaaggcgaacggcatcgatccaattccaggccagctcccagccagtcccgagaacgagctgaagcggcgaaaacgcaacgaataccaggccagcctggagcagaaggtcaacgacatgaagcggaagcagcgggagaacgaggacaaacagctggcggcaaagaaacgaaggtcattactcacatatattgccgctggtgttgtggtgggcgtgatctgcgcctacgcatacacgaagctaggttaagtgccccgtagccactaagtagtcgtagatcagtagtagcaatagctgtatgacgtatttagttgccgtaggagaccgattcctcccctgatacccgatttccgacttccgatccccacctgctcgtccgcctgacccggcatctaatgcgggcaacgaatcaaggacgacgtgcaacggatcggaaaggatcagagatcggacggaatcgcatcgcaacgccatgcaatcgcacacgaattgcggatggcggattgattgagctgaacgaacgatacaagatgcataaatattagggaattttttatatacgaaatacaagaaggaaaacaaaagaaacaaatgaaagaaaagaagcaactaaactaaactaacgaaaatcgggtagaaatcacgtcaaatgtagattttgcgcaatagactgacattttagatcaaatttattttctacactctaaaaatggattgataaccgaccagatgccccaaacgagccataccaaatgcaaagctcaccctacttgctcgctatgcttaaaatattaagaatatcataactaccaatgtttcaagcacccgacaaccacccactacacgcttcacttgttgttgtacagcaatttcttatagcatacgacctatgtatatttatttatgaagattatgagaaaccaccacttgttgtagtacatggcaaaatataaagtgcagcaatgtgcc

SEQ ID NO: 263 - DNA, 1765 bp, Drosophila melanogaster
ccgtcgtcggtcataaaaacgaaaagcatgtgaacgatactttgtgaagatttgaaaacgactttagcttagttaatatatgcaacaattccgcatccacactcagcagcaatcttagcagaaagacttactcagcagaagagggagtgagttgcagtaaccgtccgtagaaccaaatatcagttgccatctcagaggaggaagagcgcatccacattcgcatccgatccaacccgaaccgatcatggcaaccactccacgcagcggcggtgccagcggcactggaacggcgcagcggcccaatggcacctcgcagaacaaaagctgccaattcaagttggtgctcctcggcgagtccgctgtgggcaagtcctcactggtgctgcgcttcgtcaagggacagttccacgagtaccaggagagcacgataggtgcggcctttctgacacagactatttgcatagaggacactgtcgttaagttcgagatctgggacacggctggccaggagcggtaccacagcttagctcccatgtattatcgaggagcgcaggccgctattgtcgtctatgatatacagaatcaggacagttttcagcgtgcgaagacctgggtcaaggaactgcataaacaagcctcaccaaacattgtcattgcgctggccggcaacaaggcagatttgtcaaacattcgcgtcgtagagttcgatgaagcgaagcaatatgccgaggagaacgggctgctgttcatggaaacctccgccaagacgggcatgaatgtgaacgacatcttcttggccattgccaagaaactacctaagaacgatggcgccaacaatcagggaaccagcataaggccgactggaaccgaaacaaatcgaccgacgaacaactgctgcaagtgatgtcccttcgtagaaaatgaaatttccaacgagagatttgaaaagtttatgctgataattataaataaaaaaattatttaaaaattcaacagaatcagaaagaaatacctaaagccggctctcgcaggggacgaatttcatttgagagccacgaaaccaataatgataaagaccacataagaattataagcattaaacaaaggagctcccattcccaacataaacgaaagttgcaattaaagaaagttagttacaaattcccacacccgatttcccccattacgctcgatatctgtccaaaaaatatacaagcaaactgacactcacgcaattgagctaaaatatcagtataattccaacataaaccatttcaaataacaacgcaaattaataatgaaaactaaacatgagaagaaagcgcagggtttttggagatttcatcgtgtcgtagaaagtttgaaatcgtattgtataaaaaaaagagagaaaccccgaaaccaactaagcgagcaaagaatatttgtaaagattacatgtcgtgtaagattctgagcattaagtaaggggcagattccagttgcagttgttctcagcagcgttccaaataaaacaaacaaaacaaacaaacaccacaaggagcaaatgttcaggccagcggctgaagatcctcgctcgcctcggtttgtggcaatgtgtgtgtctctacggctccggagctcggactccagatccggatacggacgcggatgattcgactccgggtcgcggcggacacgtgtgatagttgcaatttatataaattatatatacacatatgaaaatgaaggaaaacgaaaaccacaaaaaaaaaaagaaaaccaa

SEQ ID NO: 264 - DNA, 3452 bp, Drosophila melanogaster
agtcacactggagaaacggaacgaagcggacgcagtgcgaacgatacagatacttttcggggaagcgatacttcttcggattcgtgcgtggtttcgttgcgtcgagtgaaattgcacaaattagtggaagtgcacactgtcgaatggaaatagtgcagtgccatcgcagatcgaaaagtgcaatcaattagtgtttgctagtgtgagtgtgtatgtgccagccaaacggttgagataacgtgaaaacggggaaaatatctttcaaagcaaaactaaaatatgcttaaactacggtttagccaaattgccaactagccaaaagtaacgagcacaccgaaaccaaaaaaaaaagccagcaaaccaaaatagagaaaacaatcggaggtccacgccaactaggactctgccccacctcgagcttccaatgggtcatcaccttagcaagttctcagcacgcgccaatagccaggaaaagagaaatcctaccgccagctcgagccccagggaagcagcagcactagtagagacgatcagcctggacgaggaggagctgcaggtggaagagatcctcacagaggccactgtctcagccgccacatcgccggcggaagtgcgtcagatcatcatcaaaatccagctggccaaaatggagaacggcaatccggtggccgctggtcaggtggaaagtttcgccgaggtggtggaacaggaggaggagcagcagcggcaatgcgcagatggtgccaccgacgacgacgccgccgccctgtctgcggattcgctgaatgcaaatgggcagattgtgaatgtgacgctggagggcggctacggcgaggtgggcgtggtgacaaatcgaactgctggcagttcgccggaagcggccaaaaccgaacgacagcccgtgaataacaacggtttagcgggaagcgtcggcgctgcgataagtacgttacaactgcacgacaaccatggcggcaacgccaactgccccttggaagccgacgacgatgacgacctggatgagtcgctgttgcgtcggcgtcgcagcaacagcaacagccgcagcaacatccaccaccaccaccaccaccaccagcagcagcagcagcagcagcacgaggccgaagtcgtcgagtattgcgaagtgctcgagtcgctgccagtcagcaatatgttgtcggcgggaacgcaacacagcagcaagccagtttccagaagcaataatagcaacagttgctgccgcagtcgcagcagtaaagcactttcaatgggagcagcaacatcctccgcctccggatccgcatccacatccgtgtccacatccacatcctcgaagcgacgatgctgcaagtgcaagtgccgcgacgccatccgaggattaagggatatgctgccgagcagcagcagttccgtgagcaataaaaaggatgccgctgcggtggtggcgatggttccgaggaaatcccggacagctgaccgccgctccacaccgcccacgctgggcacatcgagtggtggctcacagcgccggatgcagagccaaaggatacgaaattccgtcgccgttccggacgccagccatcaccatcatcagctcatcattcggatcacatcgccgggcttcgtggtcgagtcgcccaatggcggccgcgtaactgtggtcaccgagcccgccccccagtcgccccagactccgccccggccacgtcccctggccacggtcgcccccgccggaggggctggccatgccggaatcggagccgcccgcaacatgaccgtgcactcgcaaatcgacttcatgcactgcctggttcccgatctcgagaagatcacgaacagcagcttctactggggcaagatggaccgctacgaggcggagcacctgctcgagggcaagccggagggcacgttcctgctgcgcgactccgcccaggaggagttcctcttctcggtcacattccggaagtacggcaggtcactgcacgctcgcatcgagcagagcggtcacaagttcagcttcgactgccacgatccgtgtgtgttcacggcgcccacggtgacaggacttttggagcactacaaggaccccgcctgcgtgatgttcttcgagccctgcctgacgatacccctgcacagaaggcagaccttctccctgcagcagctctcccgggcgaccattgtgtccaacaccagctacgacgggatcaaccagatggagctgcccggtcggctgaagagctaccttaaggagtatcactacaagcagaagctgcgccgggaggagcagcaggtgggcttcacctactacgaggacgtggagagcggcagcgaggtggacgaggacgacgacgagggggtcaacatacgggtctcctacgttcagcacgccgaggtggtggcccagctgcagcaggtcaccacggcgtcgggcccatcggctccgtcctcatccagatcgtccaatcttcaggagcacctcagcaggctgcccaaccgcatggcagccgcctttggtcggatgtcggccaatctgaattgctaccagaagactgtcgccacgccggagcgtcactccaactcctcctgaggatcaggacgtggacggaggggcaaacagaacccagaaaccaaaactcaaactgagacaatcccagtgcagcgtgtgccgccaccataagttaaaagatcaaacgcgaagccacataacaaaatcgctagctcgctactacaagactgtcatggatcaaaaaccaaatgttcaccatatatatctcacctattggaatgcagctcggacggatttttgagttgtggcactcttgaaagcgagctggtagaatgtagaatcgaaatcgcagttagctaattgtactataaactaagtattattatctaaagcaaccctctctcctacacacataagtattgcaaaaagaagggccaatcgagcttttcgtaatcgctggtattcttgtaatatttcattgtatttatttgaagtatggaatctaaatgatgtgttactgttacgtgtaaatacgagatacgaatgcagcttagttagtgtaaaactctctcattagccaaatttccaaatgtaattttcgcctatttatgaatatactttatttatttattcgaagtgatttcgttcgcaagcgagtgctttgtttaaaaagaaaaaacccgtcagttgtacacgtgtagagcatttgtaaatactaccgattttcgcattaagctgtagctatattaatataatgaattataaatcatgtattcctacctaggtggttgctgttattcgtaaacattcaataagcagttgtttccaatacctatttaatgtattttacatatctcacatgttgatgagcatgcgtatcaatattcaaaaacaaaatcgaaaaaagagtcaaacaaataaagttgatcaagatattagaaaaaat

SEQ ID NO: 265 - DNA, 1753 bp, Drosophila melanogaster
agtttgaatcgagagcttgaaagagaaacaacgtgaataaaaaaacttttaaagggtgttgttacatgtaataagtgcaacttaaaaaaaacttgtaaaagctaattctccacaacatagtgcctaccaatgtgacccgttttctgtcaagtagatatccacatttatcaaaggcgttgtttgaaataccagggagaaaagcgttggccacactgtacgacaaatttgttgttttcattcaactaaatcccttcgaacacaacgacaaaagttaaaattctatcaaaatttcaagaggatttcaattgaagccgatctggtttgccaagcacaatgcctgcggttgaggagacacaaataacaaagtacctatcgaagtataagtacgtggctgccaccaagaaggacgttgtggacgtagtcacatcgttccgcagcttgacctacgacctgcagaggttcgtgttcaacgatggcagttccaaggaattgttcaccatacagggcactattcccgtcgtctacaaaaataacacttactacattcctatttgtatttggttgatggacactcatccccagaatgcacccatgtgttttgtcaaacccactcccaccatgcagataaaggtatcgatgtatgtggatcataatggcaaggtatatctgccttacttgcacgactggcagccgcactcctccgaccttctctccctcatccaggtgatgatcgttaccttcggagatcatccgccggtgtactcaaagcctaaggaacaaatcgcagccccatatcccacgaactcttatatgcctcagcctggtgcacctggtggcagcaactcgtttctgccttatcccacagctggcggagctggtggtagcaactttccaccgtatcccacgggatctaatgtcggaccgtaccccccgacacccgctggtccagctggcggatccggatatccggcctacccgaatttcatacaaccaaccgccggtgggtacccaccagctgcgggatataatccctcaaatcccagttccacgggaactattaccgaggagcacatcaaagcatcaatcattagcgctatcgacgacaagctgcgccgccgagttcaggagaaagttaatcagtatcaggccgagatcgaaactctcaatcgcaccaagcaggagttgctcgagggcagtgccaagatcgatgccattatagagcgcctcgagcgcgaacatattgatatgcaaaagaacataagtatattaaaggacaaggagcaggagctggaaaaagctcttgaagatcttgagagcgccgaggccattaaccccgacgaggcggtgaccaccacagcgccactttaccgacagttactcaatgcctatgccgacgaagcggccaccgaggatgccatatattacttgggcgagggtctccgcggaggtgtcatcgatctggagacctttcttaagcacgtgcgacagctatcccgcaaacaattcatcctacgggccaccatgcagaagtgcagacaaaaggccggtctagcgggctagaagagccatgatttcaacagttgccgtgatttcttattcgacggggtagtgcgagcacgtgcagacgatttatatgttaccatcaaaaatattcgataagttttaagcgcaaattgaatcttaaaaattgaaattataataacaataatcctaaataaaacaaaggcctcatgtatgttaacgcccacgatca

SEQ ID NO: 266 - DNA, 21 bp, Artificial Sequence
  primer
tgcctgttttctggaaatatg

SEQ ID NO: 267 - DNA, 18 bp, Artificial Sequence
  primer
ctcgctgggtttcatggt

SEQ ID NO: 268 - DNA, 18 bp, Artificial Sequence
  primer
tcgaactcacgttcgagt

SEQ ID NO: 269 - DNA, 21 bp, Artificial Sequence
  primer
atcatcttcgggatggataac

SEQ ID NO: 270 - DNA, 19 bp, Artificial Sequence
  primer
gagataccccgtgatgaca

SEQ ID NO: 271 - DNA, 20 bp, Artificial Sequence
  primer
cttgggaatacgcacaaaga

SEQ ID NO: 272 - DNA, 19 bp, Artificial Sequence
  primer
aggtgctggtggaaaagaa

SEQ ID NO: 273 - DNA, 17 bp, Artificial Sequence
  primer
acccgtcacccggaaag

SEQ ID NO: 274 - DNA, 19 bp, Artificial Sequence
  primer
tatttgctgtcagcctctg

SEQ ID NO: 275 - DNA, 18 bp, Artificial Sequence
  primer
tggtccgtcctcagcatc

SEQ ID NO: 276 - DNA, 18 bp, Artificial Sequence
  primer
cgccctgatctttgtggg

SEQ ID NO: 277 - DNA, 19 bp, Artificial Sequence
  primer
ggacgagtacatcgcaatg

SEQ ID NO: 278 - DNA, 18 bp, Artificial Sequence
  primer
gcaccacctcgttgaaga

SEQ ID NO: 279 - DNA, 16 bp, Artificial Sequence
  primer
gggcagccacatcggt

SEQ ID NO: 280 - DNA, 21 bp, Artificial Sequence
  primer
gaacttcatttggaagcgttt

SEQ ID NO: 281 - DNA, 16 bp, Artificial Sequence
  primer
cttgcgccggaaccag

SEQ ID NO: 282 - DNA, 15 bp, Artificial Sequence
  primer
gccgccggtaccgtc

SEQ ID NO: 283 - DNA, 18 bp, Artificial Sequence
  primer
aagtaggtgggcgattcc

SEQ ID NO: 284 - DNA, 17 bp, Artificial Sequence
  primer
ccgtggccacaggaaca

SEQ ID NO: 285 - DNA, 21 bp, Artificial Sequence
  primer
cagtcctgttcatgtggaaat

SEQ ID NO: 286 - DNA, 19 bp, Artificial Sequence
  primer
ttgtctggctgtgtctgtc

SEQ ID NO: 287 - DNA, 21 bp, Artificial Sequence
  primer
gacaatccttggcccaataac

SEQ ID NO: 288 - DNA, 19 bp, Artificial Sequence
  primer
atggcatccccagtagtca

SEQ ID NO: 289 - DNA, 22 bp, Artificial Sequence
  primer
gtgactttgatgatctggattc

SEQ ID NO: 290 - DNA, 17 bp, Artificial Sequence
  primer
gccgacgaacagccaaa

SEQ ID NO: 291 - DNA, 16 bp, Artificial Sequence
  primer
tcgcacacctcgggac

SEQ ID NO: 292 - DNA, 18 bp, Artificial Sequence
  primer
taacggtgacggaaccca

SEQ ID NO: 293 - DNA, 18 bp, Artificial Sequence
  primer
ccgaatcctcgatgggtt

SEQ ID NO: 294 - DNA, 20 bp, Artificial Sequence
  primer
gccaaaatcaagcgaatcag

SEQ ID NO: 295 - DNA, 19 bp, Artificial Sequence
  primer
cttaattgcctgcacctcc

SEQ ID NO: 296 - DNA, 17 bp, Artificial Sequence
  primer
atcggctgcgtgagaac

SEQ ID NO: 297 - DNA, 20 bp, Artificial Sequence
  primer
ttcgttggccaaactttaca

SEQ ID NO: 298 - DNA, 20 bp, Artificial Sequence
  primer
gattggacgcttctgtttga

SEQ ID NO: 299 - DNA, 20 bp, Artificial Sequence
  primer
gttgaaacattgctgggtga

SEQ ID NO: 300 - DNA, 17 bp, Artificial Sequence
  primer
tggctgccatgcagaag

SEQ ID NO: 301 - DNA, 18 bp, Artificial Sequence
  primer
ccaatttcggcacggtag

SEQ ID NO: 302 - DNA, 16 bp, Artificial Sequence
  primer
agtggcagcggaggtg

SEQ ID NO: 303 - DNA, 16 bp, Artificial Sequence
  primer
gccctcgcagtgggtt

SEQ ID NO: 304 - DNA, 23 bp, Artificial Sequence
  primer
aaaataaatggagtaacttcccc

SEQ ID NO: 305 - DNA, 16 bp, Artificial Sequence
  primer
tacgcctcgcactcca

SEQ ID NO: 306 - DNA, 18 bp, Artificial Sequence
  primer
cgcaatgtggaggtgaag

SEQ ID NO: 307 - DNA, 19 bp, Artificial Sequence
  primer
atcgaaatacgagccgatc

SEQ ID NO: 308 - DNA, 18 bp, Artificial Sequence
  primer
ttcgagggcccacaatgt

SEQ ID NO: 309 - DNA, 19 bp, Artificial Sequence
  primer
tggcaagtcgcaactttac

SEQ ID NO: 310 - DNA, 19 bp, Artificial Sequence
  primer
caaaggcacctggtttgtg

SEQ ID NO: 311 - DNA, 17 bp, Artificial Sequence
  primer
cagtagcgcagacgttg

SEQ ID NO: 312 - DNA, 21 bp, Artificial Sequence
  primer
ggtattactctgttccgattg

SEQ ID NO: 313 - DNA, 22 bp, Artificial Sequence
  primer
cttccaggtttttgtgtatgtc

SEQ ID NO: 314 - DNA, 18 bp, Artificial Sequence
  primer
ggcaaagatcccaagcag

SEQ ID NO: 315 - DNA, 19 bp, Artificial Sequence
  primer
gttgaaggtgcagcagaag

SEQ ID NO: 316 - DNA, 19 bp, Artificial Sequence
  primer
cagccatcgattggaacag

SEQ ID NO: 317 - DNA, 21 bp, Artificial Sequence
  primer
ctccaagtgccagaacataaa

SEQ ID NO: 318 - DNA, 17 bp, Artificial Sequence
  primer
ggccacaagcatggtcg

SEQ ID NO: 319 - DNA, 18 bp, Artificial Sequence
  primer
ccttgcccttgcacttct

SEQ ID NO: 320 - DNA, 17 bp, Artificial Sequence
  primer
tcgcccatggtgctaga

SEQ ID NO: 321 - DNA, 19 bp, Artificial Sequence
  primer
cgatccacggtgattacag

SEQ ID NO: 322 - DNA, 20 bp, Artificial Sequence
  primer
cagactcctacctcgttttg

SEQ ID NO: 323 - DNA, 19 bp, Artificial Sequence
  primer
aacatgcgctccagatagt

SEQ ID NO: 324 - DNA, 18 bp, Artificial Sequence
  primer
gccaagagacggagaaga

SEQ ID NO: 325 - DNA, 19 bp, Artificial Sequence
  primer
tacggatgctggttgatgt

SEQ ID NO: 326 - DNA, 19 bp, Artificial Sequence
  primer
cccagggccatttggattt

SEQ ID NO: 327 - DNA, 18 bp, Artificial Sequence
  primer
tcctttaagcgctgcatg

SEQ ID NO: 328 - DNA, 18 bp, Artificial Sequence
  primer
gggcatgccgtcattaca

SEQ ID NO: 329 - DNA, 18 bp, Artificial Sequence
  primer
cggcgatatttgctggtc

SEQ ID NO: 330 - DNA, 16 bp, Artificial Sequence
  primer
gtggcgcaccggaaag

SEQ ID NO: 331 - DNA, 23 bp, Artificial Sequence
  primer
gatgaacttcattgttgttgaaa

SEQ ID NO: 332 - DNA, 22 bp, Artificial Sequence
  primer
tgacgaagcatatacaaggata

SEQ ID NO: 333 - DNA, 21 bp, Artificial Sequence
  primer
tgggtttttctggtgaaacaa

SEQ ID NO: 334 - DNA, 18 bp, Artificial Sequence
  primer
gtttgcatcggccaaacc

SEQ ID NO: 335 - DNA, 23 bp, Artificial Sequence
  primer
gtgtcagagaaattcactaagta

SEQ ID NO: 336 - DNA, 20 bp, Artificial Sequence
  primer
aatacgtttcggtcacgatt

SEQ ID NO: 337 - DNA, 23 bp, Artificial Sequence
  primer
gtatctgtacttggtagagtagt

SEQ ID NO: 338 - DNA, 17 bp, Artificial Sequence
  primer
ccccgagctgaatccca

SEQ ID NO: 339 - DNA, 20 bp, Artificial Sequence
  primer
cttcatgcggttgatgacta

SEQ ID NO: 340 - DNA, 20 bp, Artificial Sequence
  primer
cgtaagtgctagttcctctg

SEQ ID NO: 341 - DNA, 16 bp, Artificial Sequence
  primer
tgccgagcgtcccttt

SEQ ID NO: 342 - DNA, 18 bp, Artificial Sequence
  primer
cccacggagctgttcttt

SEQ ID NO: 343 - DNA, 20 bp, Artificial Sequence
  primer
aaacgactacccaggacatt

SEQ ID NO: 344 - DNA, 19 bp, Artificial Sequence
  primer
aggcatctgcagattctct

SEQ ID NO: 345 - DNA, 21 bp, Artificial Sequence
  primer
gaggaatgggaatggatgaag

SEQ ID NO: 346 - DNA, 18 bp, Artificial Sequence
  primer
gtcatgggtcccgggatg

SEQ ID NO: 347 - DNA, 19 bp, Artificial Sequence
  primer
tcgcttgtcacgattcttt

SEQ ID NO: 348 - DNA, 20 bp, Artificial Sequence
  primer
ccgccacaatgataaccaac

SEQ ID NO: 349 - DNA, 16 bp, Artificial Sequence
  primer
cgcgtgcgtgaagagt

SEQ ID NO: 350 - DNA, 18 bp, Artificial Sequence
  primer
atctgttgaacgccgagg

SEQ ID NO: 351 - DNA, 21 bp, Artificial Sequence
  primer
ggtatcggtgaagttcttctc

SEQ ID NO: 352 - DNA, 17 bp, Artificial Sequence
  primer
ttgtcgcgaccttccca

SEQ ID NO: 353 - DNA, 20 bp, Artificial Sequence
  primer
acttcttggagcagatcttg

SEQ ID NO: 354 - DNA, 17 bp, Artificial Sequence
  primer
cggacaccggctatgtg

SEQ ID NO: 355 - DNA, 19 bp, Artificial Sequence
  primer
atgttcttggccgagtcaa

SEQ ID NO: 356 - DNA, 20 bp, Artificial Sequence
  primer
tactcaaggatcgcgatatc

SEQ ID NO: 357 - DNA, 17 bp, Artificial Sequence
  primer
ggctgggtgtgggagtg

SEQ ID NO: 358 - DNA, 19 bp, Artificial Sequence
  primer
gcaggacgttcggaatatc

SEQ ID NO: 359 - DNA, 22 bp, Artificial Sequence
  primer
tcccattacagacttttgattg

SEQ ID NO: 360 - DNA, 17 bp, Artificial Sequence
  primer
ggcgccacatgtgcatg

SEQ ID NO: 361 - DNA, 18 bp, Artificial Sequence
  primer
gccgctgcccatatactt

SEQ ID NO: 362 - DNA, 19 bp, Artificial Sequence
  primer
tgtggctgtcgcttatctt

SEQ ID NO: 363 - DNA, 22 bp, Artificial Sequence
  primer
aaaaatatacagccgtttcctt

SEQ ID NO: 364 - DNA, 21 bp, Artificial Sequence
  primer
acccagctaaatcctacaatg

SEQ ID NO: 365 - DNA, 18 bp, Artificial Sequence
  primer
actccagatgctgggtca

SEQ ID NO: 366 - DNA, 19 bp, Artificial Sequence
  primer
ttgacggattgccacatct

SEQ ID NO: 367 - DNA, 16 bp, Artificial Sequence
  primer
gcctccgcgtccaagt

SEQ ID NO: 368 - DNA, 17 bp, Artificial Sequence
  primer
tgggctcggcagagata

SEQ ID NO: 369 - DNA, 18 bp, Artificial Sequence
  primer
caagtagaggagcccgat

SEQ ID NO: 370 - DNA, 22 bp, Artificial Sequence
  primer
tctttgtcatcaaatcgtactc

SEQ ID NO: 371 - DNA, 17 bp, Artificial Sequence
  primer
catcgggcccatgcatt

SEQ ID NO: 372 - DNA, 20 bp, Artificial Sequence
  primer
ttgaacatcgtggcttcttt

SEQ ID NO: 373 - DNA, 17 bp, Artificial Sequence
  primer
cctcgcaaactcgatgc

SEQ ID NO: 374 - DNA, 19 bp, Artificial Sequence
  primer
caacaacatgctgggcttc

SEQ ID NO: 375 - DNA, 17 bp, Artificial Sequence
  primer
cgaagttcgagccgaca

SEQ ID NO: 376 - DNA, 17 bp, Artificial Sequence
  primer
gagcgggcgatcatctt

SEQ ID NO: 377 - DNA, 15 bp, Artificial Sequence
  primer
ctcggcggcgatcac

SEQ ID NO: 378 - DNA, 20 bp, Artificial Sequence
  primer
gatgagaaggacgagaagag

SEQ ID NO: 379 - DNA, 18 bp, Artificial Sequence
  primer
cttgatgcggcaatggac

SEQ ID NO: 380 - DNA, 20 bp, Artificial Sequence
  primer
ataggttcaacacgatcccc

SEQ ID NO: 381 - DNA, 20 bp, Artificial Sequence
  primer
gaaggctggtgttagttttg

SEQ ID NO: 382 - DNA, 19 bp, Artificial Sequence
  primer
acttgcgtggaggaactaa

SEQ ID NO: 383 - DNA, 19 bp, Artificial Sequence
  primer
atgcgtagagttcttcggt

SEQ ID NO: 384 - DNA, 18 bp, Artificial Sequence
  primer
agctcgaggacaatccac

SEQ ID NO: 385 - DNA, 20 bp, Artificial Sequence
  primer
ggctgactttcacagtagac

SEQ ID NO: 386 - DNA, 18 bp, Artificial Sequence
  primer
cgtacgatgatgcactgg

SEQ ID NO: 387 - DNA, 18 bp, Artificial Sequence
  primer
gaacgggcagaatggttg

SEQ ID NO: 388 - DNA, 17 bp, Artificial Sequence
  primer
ggcagtgggagctctga

SEQ ID NO: 389 - DNA, 17 bp, Artificial Sequence
  primer
ctcgggtccggtgaact

SEQ ID NO: 390 - DNA, 17 bp, Artificial Sequence
  primer
cgtctgcgcagtgatcc

SEQ ID NO: 391 - DNA, 18 bp, Artificial Sequence
  primer
tgggctccgatggataga

SEQ ID NO: 392 - DNA, 18 bp, Artificial Sequence
  primer
agcgacgaggaagatgtg

SEQ ID NO: 393 - DNA, 19 bp, Artificial Sequence
  primer
tgacaaatgtggcctctgg

SEQ ID NO: 394 - DNA, 22 bp, Artificial Sequence
  primer
ttggaaaatcgagaggatttaa

SEQ ID NO: 395 - DNA, 23 bp, Artificial Sequence
  primer
cacatttttcgaattcaattgtc

SEQ ID NO: 396 - DNA, 21 bp, Artificial Sequence
  primer
cgtctaatgaggcaaagaaac

SEQ ID NO: 397 - DNA, 20 bp, Artificial Sequence
  primer
ccgtttttgccactttaacc

SEQ ID NO: 398 - DNA, 19 bp, Artificial Sequence
  primer
tcgtgatggtgttggtgac

SEQ ID NO: 399 - DNA, 20 bp, Artificial Sequence
  primer
tccactgaaagtgctttggt

SEQ ID NO: 400 - DNA, 17 bp, Artificial Sequence
  primer
gggcgaatgcacggaat

SEQ ID NO: 401 - DNA, 20 bp, Artificial Sequence
  primer
tggcatacctcgaataactg

SEQ ID NO: 402 - DNA, 20 bp, Artificial Sequence
  primer
taatcgacgatcaggaacag

SEQ ID NO: 403 - DNA, 17 bp, Artificial Sequence
  primer
gtgtggcctcggaggtg

SEQ ID NO: 404 - DNA, 17 bp, Artificial Sequence
  primer
cgtcccccggttttacg

SEQ ID NO: 405 - DNA, 21 bp, Artificial Sequence
  primer
atcagccagtcttgaatagtc

SEQ ID NO: 406 - DNA, 19 bp, Artificial Sequence
  primer
ataaaaggcgccaaggtga

SEQ ID NO: 407 - DNA, 19 bp, Artificial Sequence
  primer
tcacctgcattcccgtttc

SEQ ID NO: 408 - DNA, 20 bp, Artificial Sequence
  primer
gacgggcttcaattcctatg

SEQ ID NO: 409 - DNA, 17 bp, Artificial Sequence
  primer
gcgacgaggagagtgtg

SEQ ID NO: 410 - DNA, 15 bp, Artificial Sequence
  primer
tgctgcgcaagcgac

SEQ ID NO: 411 - DNA, 20 bp, Artificial Sequence
  primer
catttggctggaagatgaca

SEQ ID NO: 412 - DNA, 18 bp, Artificial Sequence
  primer
cacaaagccgctgaacag

SEQ ID NO: 413 - DNA, 20 bp, Artificial Sequence
  primer
ttcgtggttacacacacagt

SEQ ID NO: 414 - DNA, 15 bp, Artificial Sequence
  primer
ccgcgcgaacgactt

SEQ ID NO: 415 - DNA, 23 bp, Artificial Sequence
  primer
tgatcgcttatcatcgtatatta

SEQ ID NO: 416 - DNA, 20 bp, Artificial Sequence
  primer
actagtagcagtcagtcctc

SEQ ID NO: 417 - DNA, 16 bp, Artificial Sequence
  primer
gcgccagcgttgctat

SEQ ID NO: 418 - DNA, 19 bp, Artificial Sequence
  primer
acagcattcgggtggtaaa

SEQ ID NO: 419 - DNA, 18 bp, Artificial Sequence
  primer
gccatccgaagttgatcg

SEQ ID NO: 420 - DNA, 22 bp, Artificial Sequence
  primer
aaccagaaccagaatcaaaatg

SEQ ID NO: 421 - DNA, 19 bp, Artificial Sequence
  primer
gtttccagcgcgattattg

SEQ ID NO: 422 - DNA, 19 bp, Artificial Sequence
  primer
gcctggatggagttgtttg

SEQ ID NO: 423 - DNA, 21 bp, Artificial Sequence
  primer
ggacttatgggctgattgaac

SEQ ID NO: 424 - DNA, 17 bp, Artificial Sequence
  primer
agcgggtgcaggagttc

SEQ ID NO: 425 - DNA, 22 bp, Artificial Sequence
  primer
ttcttattactggccacatcat

SEQ ID NO: 426 - DNA, 17 bp, Artificial Sequence
  primer
cacgttctgcggtagcc

SEQ ID NO: 427 - DNA, 19 bp, Artificial Sequence
  primer
gcttgggatcggctaaatc

SEQ ID NO: 428 - DNA, 23 bp, Artificial Sequence
  primer
ttgtgggtaaatttttacagaag

SEQ ID NO: 429 - DNA, 18 bp, Artificial Sequence
  primer
cgaattccccgcagtagt

SEQ ID NO: 430 - DNA, 16 bp, Artificial Sequence
  primer
cggatccggagcaccc

SEQ ID NO: 431 - DNA, 16 bp, Artificial Sequence
  primer
gcgatggagctgctgg

SEQ ID NO: 432 - DNA, 18 bp, Artificial Sequence
  primer
cttgacgctgaagaaccc

SEQ ID NO: 433 - DNA, 19 bp, Artificial Sequence
  primer
cctggaattggatcgatgc

SEQ ID NO: 434 - DNA, 17 bp, Artificial Sequence
  primer
ggcaaccactccacgca

SEQ ID NO: 435 - DNA, 16 bp, Artificial Sequence
  primer
tcctggccagccgtgt

SEQ ID NO: 436 - DNA, 17 bp, Artificial Sequence
  primer
agagccgccgaaacaac

SEQ ID NO: 437 - DNA, 19 bp, Artificial Sequence
  primer
ggcttggtttcagtagagg

SEQ ID NO: 438 - DNA, 20 bp, Artificial Sequence
  primer
cagcagtaaagcactttcaa

SEQ ID NO: 439 - DNA, 16 bp, Artificial Sequence
  primer
ccgattccggcatggc

SEQ ID NO: 440 - DNA, 21 bp, Artificial Sequence
  primer
gagtacaagcatgtgtacaag

SEQ ID NO: 441 - DNA, 19 bp, Artificial Sequence
  primer
gttcctggtggaggtagtg

SEQ ID NO: 442 - DNA, 21 bp, Artificial Sequence
  primer
cttgcccaaaactacagttac

SEQ ID NO: 443 - DNA, 19 bp, Artificial Sequence
  primer
cgactgtgggtggattgtt

SEQ ID NO: 444 - DNA, 18 bp, Artificial Sequence
  primer
aaggaaagcgcatttcgt

SEQ ID NO: 445 - DNA, 22 bp, Artificial Sequence
  primer
aaatccatatccacttcctcac

SEQ ID NO: 446 - DNA, 20 bp, Artificial Sequence
  primer
atccctcaaatcccagttcc

SEQ ID NO: 447 - DNA, 17 bp, Artificial Sequence
  primer
aaagtggcgctgtggtg
